United States Patent Application Publication US 2019/0183130 A1 - sequence listing, part 20

SEQ ID NO: 2 - DNA, 21303856 bp, Cryptococcus oierenis (residues 17,430,436-19,367,150 of 21,303,856)
tcctcgagctctatctatcgcaggtcgatattagaactcgttcgaacccatcgtatcgtcaacatctcggcaatcaaacgcttctcgagcttcactgtatcctcaaccagctctttttcgaatcctgaaagtacgacacccgcgaacatgttgtccaaaatcgtcctcgccctcgccgccatctcatcggcttccgcccacatgcaaatgtcatggccttatcccttgcactcgtgagtccattttcagctagaactcggactggtttcgacgtcgatccgatcgatcttcgttctgttaggaccttcaaccctgccacccctgaagtcaacaaggactacagccagacgtctcccctacctcagggtggcggcggattcccttgcaaagggtacatcaacaacccttctggctctcccttgatggacagcgtcgccactatccaggccggatctaccttgtccaccaagtttgccgggacggccagtcatcgaggtggtagttgtcagtggagtatgagttacgatatgggagccacttggaccggtacggtcgacgagattcgcatatgcaggatgttcaactcgaaactgacatccccccgaatcgtattctttcttcccggtcgtcgttaccgtgacgtagtggttcacacgcaaatgggaggatgcatgacggacgccttgagcgtcgacgtacctatccctagcgcggctccatctggggaagccctattcggatggacctggttcaacaatgcaggtgagcgatttgaaaacactggggcccgcttgatcagctatttcccccgggaaaggatctacctttaaaggcagaaccggacgggatgggttggccgagattgagcgggctcgcatctttcggcaggatccacacaccgatgctgatcgcttacactgcctttatcgcttttataggcaaccgagagatgtacatgaactgtgccgtcgtcaccgttgcgggaggtggatccggtttgagcggaccttctcctttcgtcgccaacgctggagtcaaccagtgtgctaccatcgagggcgtggacactgtcttcccgtgagtttgcgtcgcacgttcatcccacgatgagagccgggggctgatcgtaagggcatgccgacatcttctatagtaacccgggaaactcggtttcgtacggaggatcttacgcttcgagccgacctaccgaagctaccggattcacgggatccaactgtgtagcacctggtgcctcgagcgattcgagttccggttccggatccggcgcggagtctagctcggcagcttcatccagctcggtccaagctgcaccctcaagcaccatcgttgccagctcgtccgaggctgcctcgtcttccactgctaatgccaagcctaccggtacttccgcaacaggggccgaggagtcgtcactttcggaatcatatacatacatcgcatcctccaccaccgatgccgcttcctcggttgagtctgcttcttcgacatacgagcctactcctactgccgaagctggacaggagtcttcctcggtcgctagcccggcttcaaacacaatcagcgtaagtagcccggcgagtcgcaatctctcgagctccgtgactcatctctttgtgctttcctatacgaccgtcagacctccactggccgtgtctgtcgaatcaagaaacgaggcgtctctgtgcaagaacgaagccttcacccgggtcagaagctcgtcacccgtcgaaccgctaccaaggaacaccgtcgatcgaggttcgggcgtatcggccacatcggacactgagggagagaccaacattcgccggcactcgccgagattagacgacgactggttcggacgtgaaatcgaggcgagacccggtaaccggtggatcttcgttggagtgggaagcgcggcagtagtagcctgaacgacaaacaagagatgaaaagagtctagatgtagccaatttgtggagacgcttttctttgacgacattatacgatcattcacgttttataccagacagtgcatttctcgaaattcagccgtgttccaaaggttctgagtgcgtctggtagacatagtcggaccgcctctgtaaccagctaggctgtatggcgagccgtgatgctcccgagaaggaatttgcgacctgccggctatctgacgagcagaatagaaatggtgtatatatcgttttgcgcaagatatgagtgacgcatgatgtccagtatacagtgaaagatcccccacgtgacccgatcgatcatcgtctagacatccttgtccagagattcccaagcttgcttcttcttttcgtttcgcaatttcgcctcttcagagttcctcgctgtcctgtccagtctctaacgggttccaggggagagcaagaaatggtaagctcacggatagccgcgatctggctggctgctcgacatacttctttccgcaggcacaagttcaatgcctctcgggtagcattacagtctccctttaagcgggccaggaagcccctcgcatggcattcgttcatagcttgaatctccttgagacaggctgttggcaacggttcaaatgtgtattcgtcgatcagctgcaggaccgactaagcggggggcacagtcgggactgacaggcttccctgatagggatattgagtggtgcatgcatcgtatcgatcttgccttgtattcctagtccagggcttgttgctatgtgcaacgggatgcctgaccttgcggaaagagagtaagtagtctgaacaagatcgaccttctcggttccgtcgattcacccgatcgaaaaccggttctcacaaagtcaacaactcggcgaaacggcgcttttaacatgttctactcgagctttcaggtactctgtacatcaaagttcttctgagctccatccatccgattgtttctgtactttccaatagctgatagagatatggtagccatgctattcgttagaaggtacattaaataagcaagaccgagttgacgacaccgcacgacggcaatgaacactgcctgctttggaatctttacgaacctctttacgacccgatcttctcaacgacaagccagcttgcctttactttctggtggcgtgtccgatatggatgggataacgacaaagcccgggtgtatattctgcgacgtgactgtagaaaagggtttcagagtgcacgatacggtacgtatcgtcgtcgccaactaaagaggctggagactgatagatgttacgtttgtctcggcatagtcggagagtttgatcgcctttcatgatcggtatgggatattctcaaaggttcagtagcgtatagaatcttcagctaaggatagcaacctgtcctagatcacctggggcgcagtatcacatcctggttatacctcgcaagcatatctgtgggttgagactgagactgaatcttggagactgcggatgtcctgaccaaaggttctgctttaagctaccgtcaaggatctcagggaacaagacatctccttgagtgcgtcctctcgaacgtcttatctttctgccggcggtggctgatggcgttgcaccatccatcagtaaccgaaatggagagctttgggcatcgaatcttggacgacctaggcgtggaccaacgcaacagacggttcgtacaggtattcttgctaaaatttcgtgacatctgactgtaactccgactcgcccctcctcaggcttggtttccatattccaccgttctcctcggtccatcacatccacctccacgtcctctccctcccgctcacacatcgttgggcgcacgttaaataccggtcaactacccatcgcaaagacatttctcagctttctaagcacagctactcggatgcgaatcgcttcactgctcaaagcgaagtagaggaagctcggaccggcagaacaggcaagaaatggggctggtttgtcgacgtcagggatgtcaaagacatccttgcggcagggaagacgatcaaggtcggagcagtacgagcttgatgattctccagtcaacacggcgaccacttttgtgatctgagaggaagcggtggaatgctctcgctagtagccaatttcaggccgcagcaacaacgccctgagcatcttggtcaacttacggtcaagattacggtcaacctgtgttccgagctgtaaaagttctggtcaagaacacaagtcgctgtcaatcgtgctgtagccctgggcttgcatcgttcgtctgctttagcgctggagtaagcctacatgcgctcgcgagtgcacttgcacaagaaaggccgtgctgctccgaactgccacgatagaacgctcgaccgaagactggagaaggaagatgcaccatgcccttgttgtatcgtctactatcgacgacaagaatcatctgcagtgatttagatgcattatcagttttggcatgtaccaagtccttccatgaatccatcctcggtatgaggcccatcagtgactctgtcgatgagcttgggcgccgcatgtcgtactaaatgcgtcgaaagagtccatccatggtgaaggcaagcgaccgtaacactgataagggtgtagatggtgtatctttcggtttaagtacatttctgtcgcgccatagagggtctacaggacgttcgacggatctagctgaagccatggtggcctgtatcagtgcgcctctcggccggacgacgtaacgatcctggtggatctctgccttcttgtaaatgatcccagactcatggaacctttcggaaaggtagggacgtgattaagaacgtcaagaacgtgagcacggttcagataacgtcttgcgtgaggtcgcaacaatattgctatagaagacggatgcacacatagcaaggaatgaaagagggcgtgcgaggaggtggaccacatccggaagcggcgatgcacttcagtgacaagactcgccaacaatcaccaagtagcagaactacgcacccgcctgtccaatcaagttggttaaagccaccagtagtaatcgaaacctttccgccgccagccgtcctcagagtttacggtagatcagacagcttcggagcatgttcaagcatgttctctgtgccgcgatggtgcggaccctttcctcgtggctggacccgatctttacgttacccgctcgcgttcacgcgaatcgtcatgatctgctgaagcttcgagctgtggtccggaggctgtactacggctgtaaccatcctctgccatcatgcatcatggtctgggacaacgatattgtagcaccgctatcgagactcttgagccctcgttcattcgaaaagtcacagaccagagttattcttgattcacgcagtatctacacgaccccctgaacgaaaccacacgagagacacgaaagagcagagcgatcaagcggggatgtcgagtgccgccaactttatcgctcgacgatccaactcgtcgacgagtctggctcagttctacaaggagaacaacaataacatcaattcttccctgtcgaatcataatggcgagcttgatttctgcaacgcattctggggcgaaggagacgctggatacgaggtcatcagcgctcgactgcgagcgtcgaacaggactgttgacgatctgagagccttttggaaggaaaggtacgaatcaagctcctttagccaccatgaacactcgctgatccacgatctgaaatgccagagctgcgatcgaagaggattatgcgaagagactagcaaagctcgcgaaatcgactctgggtaaagacgaagtcgggtatgtataccattagctcgctatcaaggagtccatctcggctgatgccggtccttcacaacttcagcaatgccaagtcagctctggattcacttcgatcagaaaccgagaagcaggcgcacgcacggcaaagactggtggccgagatcaagcgggatatcgaggtcagtctaatgcgatggatcgccgagcctcagcaagctcacgaaaggaggtcactactataggcacccgctagcgagttctcgggccgacttgctaacctgaagaagactgtgagtaatccgaagaacagctgaacgtatggacggcggaaagactgatgatatgtttttcgcacgtcgtacagtatcaagccaacgtcgagaagtcgttcaagacgaaacaggtccaggaggctaatgtcgctaaagtaggcacagttgtctgtcatgatcggatctcttgcactgactcatgttgcctttgcgtcccgatcaggcccgagaacgatatgagcaagactgcctcaggatcaattcgttcaccgccaatgcgtccattgtgcaaggccgcgagctggaaaagctgcagaggcaactggacaaggtcaattcgtccgtcggtggtaacgaaagggagtatcaagccatggtcaggatgctggaagagactacacggaaatgggagctcgaatggaagggcttctgtgatcacgttcaagatttggaagaagagaggctcgactttatcaaggataacatttgggtgtatgccaatgctgtttctagcgtctgcgtgacggatgacgaggtaagccgaccgtaatgagcaagttgagactcggctgatcagtctcgtaattatgcctccagtcatgcgagcgagtgagggtagctctggaaggattcgaggctgtgaccgaggtcgaagcgtttgtgaaaaactttggtactggaccacgaattccgggtaagtgcgacatcgtgtgccgcattcgacttctcgttgatgtcagtgtctcctagatcctccattgtttattgattattcgaagggggaggcttaccatagaaccaatgagaccgcgagaacggcgcatttctctcgattgacaaatcgatcagcactcaccagtcagcctgcaggagagacgcaaaacgagtatgagacgagcccccaagagcaacccgccgagcaaagagaggagcgtcacacgctggaggatctgcaaccgcaaaagcccgctggagtcggcagccttaccaacggcccaatcgtgtcgaacgcctcttctcagcccagatcgccttttggtggtgtcgcaatgccaggtatgactgagtcggtcagcaatgtcagaacggcctcgccggcacccatgtctgctcctccaccgccagccgaaaagccagccagacccccttcggtctttggtaggcccacttccgcattcggtcaacatgcgcctcctccgactggaccgagcgcaattcgaccgtcgccgagtatgacagaggaggatgaccctatcgctcgatcgctggctgaattgcgacgggatcctcccccggccggaagcatcaggcgtggacattcgcagcgcaggcccgagtctgtcgtttcaacgcatcctgcctccaggcaatcttatcagcagccgcccaaatcacccggacctccttcaagtgtcggtcacggaggaaaccggcaatcctaccagggacacatggcgggaaggccttcgatggacgccggcctcattcccccgatggctgggcacaccgctgcggatttagcccgatcgcgtgcggaacacgatcaacgagccagccgggccttttcgcctgctcctggacaggattatcactctgccgctgctaatgttgtcggaacacacccggcatcacgcccagccacaccttcagcccagtcgacaaccgctcctcgagcaccttcgcctgcttttatgcaaccaccggcgatggcaccgtcacccgtagatgaggtcctcggtcaatatcaccaggcgttccctggcgagcgtagtcggtctcgagcgggatcgttcgtctcgacccattctcgtcaacagtcgcataacgcagggcccggtcagcctccagctcaggcgcatgctcgctcacctagtcctgcacctagggaaggtttcgtcggaatcggagcgggacgaagtcctagtccgcaaccccagcaatttcagtctatgcatcagcccaatgcgagggccccatcccctcaaccgaacatgcgagctccctcgcctcagccaaatatgcgggcgccttcgccccagcccaacatgcgatcgccttccccccaaccagatgctcatcggcgcggccaatcgtattctagcatgggacctcctggagcagggcagcaaggcatcacatcgccaacctccccgcatccatcgcaaaccggctatgggggacagcagcatccgggacggcccacttcagtcgtcggccagcccatggtatcgcctgtccaccaacagtcttatggctccgcaagtgggctgaatcaatacggctcggtatcatcgctatctcaaccgcctcagcagtatcagcaacgtgataacagtcagcatggtcaacccaaccccggccagaacccagcgcagcatccttacatgccacactcggcgtcttctaccggacacggggatccccgatatcaaggctatcaacacagtcccatcacatcgcctcctcccggccaagcatcataccaaaactatggaggttcaaacgctcctacaagagctccgaccaacaatgtgccgaccaacaatgtggcgaccaaccaggatccacgctataggcctcagagcgtccagcctggtccaggctcacagttgaaccagtatcagaggtcggcgagcccggcaccccccatccagcctcaagcgcaataccagcaacatcaagggccctccgctcaacagcctgcgtatggtggatacagtcaacctcaacacacgcagcaacaacctcagtacggagggagccagtttgctagggttcctagtccggcaccccagcagatcaatcgatcgcctagccctgtgcctcctgccccgcctgcggacacccctccaactgggcaatactcgacgactggcgagcccgttctattttgtgagtccaaacgttaaggttcgaagatggacgggactgacgcgatcgcaatcacacttgtatagatggtacgatgatccgtgcagaaagatatcacctgctcgtcttttattcattcgaatttttatctcatgtttgcaaaattatagtcaaggctctatacgattatcaggcccagagcggtgagtcaggagccgtgtgcactgcattttctgtagaccttagtggctgatcaaccctcgcgttctgattcagattcggaattcgatttccaagtgggtgacattatcgctgtgactcaaacacctccagatggttggtggagcggtaagcgcatcgaccggaatcggctgacaagggtcgaagctcatgtctttttatgagattaggtgagcttctcgatgaagcgcgtcgacaacatggaaggaccgactttcctagcaatttgtgagcctattgatccgtgacttaggctggaaccggaccgttgttgactttcatgtcccaccccttccgcagcgtgtgcttgttctaagggtcacgtgttcgaaaggaggttcgcaacgaattttggcccagcgatcgaggcgcaaaggactgccctggttcagacacgaccgtgcagatatacaacgttcaggtcacagactctagctagactctcttgtttcgcctcctttttaaaatttcgttctaatccacgttgtagtttctgtcatgcatcactgcatgtacctgtgttgttttgccaattgatgctcgaagcgcaaaacggaagagaacgcgtgtcatccaaaatcgtgtgaagcgtgagaaagcgaatgatcgagttcgtcatttttcggagctcgcaatgtttcgtgcctggtcacccgccccctccctaacccaccgtccatcgtaggtgtcaccaccaccttcccccctccccttccacccctctgccagcagatcctacagatacaactcgtctcctacctctatctgaccttttcaacatacgtggtgttctctctcttcctcacagtttctgtagatcaaacaacatctaaagcaactatctcaacaatgtccaagatttacgtcggtgagtttcgagtgccagagagcttctgacgacgactccgtggaaagtaactgacgaggcgtcgctcccttcgccctcttccaggtaacttgtcgtggaacaccaccgatgagattctcatgcagactttcacccagtacgggcctgtccttgacgttcgtggcatttctctcgactttgatcgctttcacggtcaagtcgcgctctctcgttcgattgtgtttgattctgattatcctactttccgatatcatatatggtgcacacctcttgcccgctcgctctctcgctggtcgtcgtcgtcatccgtctctcgcaacattgggtcatcgtcatctcgcgcgattcttcgtctctctctctctatctctccccctctggtcctggtccggcatcccgatcgtcgtatgctcgttgcttctccgcacttgtcgttacgcttgggcttttcttttgggaaacgaaaaactttcaaacggctatgctgctcgtcctggcactgtcgtttgctactgggctatttgctacgccctcgatgaacttgacgcatgcgttggcttgggtgctttatcgtgaatcttctccttgggatctcgatcatcgctatctctcgactctccgctggctctcgtcacggttggcatgacatgcatctggtgctttgcttggcatctcgaatgcgttcggcctcatgcaacaccaacagggaatcgtcatgaaggaccgtgagactggccgatccaggggattcggtttcgtcgtacgtattgctttctcaaccataccccccactctgctccaccccgaatgcgcattaaattcgccgcttcttgtcgttcatagacctacggttccgccgaggaggccaacaacgccatcgccgccatggacggacagaacttggacggacgtcaggtccgagtcaacctcgctaaccaacgtaccggtggaggttgtaagtttccactctctcgtggattttcctattgatcaaatttgcccctttgctctaacatcacacgcgctctaccagacggtggccagtctggctaccaaggaggtggtggatacggcggtggtcagggcggctacggcggccagggtggatacggtggtggatacggcggtcagtctggtggttacggtggccagggcggctactcgcagggcggattcggaggtcaaggtgattatcaacaaagctaaaccctaatcacctttgcgcttcctctttttgctgaatcgtatatacttctgaatctccaggcggtggatacggtggtggttacggcggacagcaggccgctggtggtaagtcttcgtgcttgagtctgacaatgtcgtcagcccgctaacatgttcgctaccgaaccacaggcttccagggtggatacgctggtcaggcccagtccggttacgccggtcagggtcaggctggatacggtggccagggtcaatccggctacgctccccagggtggataccaacagcagggtgccggcggatacggtcagcaggccccttacggcggtcaacagcagtaaactcgtcgcgacgttttcatgattgaagtttccccgactcgcgctcgacctctactctccctctctttcggaaaaacacacattcgactcgacccttcggaaaagatcatttaaaaaggacgattcttgcaggacctagtggaatgagtgggacatgaaagttggaagacgaagggaaagggcaccgattgttttgcactgttcaaagagtgtggttgagaatttgatcgtccttgtgaaatcgtacctcgcttcgtaattacctgtcgtggcctctgtatcaactttgtgttcgcatgaattgatctatcgaaaaggccatcgtgagcttgataattcggtcgtggcttggtcgaggtcgaggtcgtttgacacggatgacggtgagatcggcgctcacttttgaacggaaaacgtcatcgcgagcgcggccgagctaactttgccggggcgagcgagtgagaaacagagagagagtgagaggcgatgacggtctttcaatatctcaagtgggattgcacctggacacaagctacagtaaactagtcctgatttgtgcagccaaggtattctcgtcgtattctggtagccacgtgctgataggatcgtcaagactcctcgtcccaacaggatgttcagacaagcgacatcgatcgctcggcagagcgttgccagacagtcactcgcaaggaatacaaggactcttcacctcgcaagccggttactcacgacgaatctcgctggagccaatcatggcttggccagtgcttcccgattgagggcagtcaggcatatgcatgtcagggccatctcgtttggaaccattccacgcatcgtcgctaaggccttccgcgtgcctatgtacggggctggtatcggcgcaggagcccttacatatgcaaactacaagctggaaggtgagcatgttttggtatagtaatctcgacacaatgttgaagaagaggtcaaatgcaggtgtgcgaacggccacgaacgacatgctcgattcgatatcctcgacggtacacgacgggtacgatcaggcgagctcgttgttctctggcgtatcgagtaccctttcgtccgcagcggggaacataggaggagagttgggaaatttggcagatggagtcaaggagaatacgaatgggttcatgaacggcttcaacgaatggtggggaggggtcaagttcggctctggctcggcgcctcaggaagcgcctggtgtatcgccgacgagcagcgtcccgcctccagcatcccgaccgccccccaacgatgatagcaacaacaacaacgggaagaagccagatgatgaagggcctctagctggaggggccgcagctcttgccgctctaacatccgcctatatgaaccgagaatcagaagtcaaggacgattcagctgatgccgctgaaccggctcagccacaagaactcctgcaactcacccggaagttgatcgagattcgacaagtgctcatgtcgatcgaccagagcgatgccctgaaactgccaagtatcgtcgtgatcggcagccaaagcagtggaaagagcagtgtgctcgaggcgattgttgggcatgaatttctgccaaagtcagtattcattgcgctttgtccgtgtgcgacttcgcggctgatgtcaaatttccttgttcttacacgacaataggggtgacaacatggtcactcgtcgaccgatcgagctgacactcgtccacactccagatgacggctcgggagggccccgcgagtatggcgtgttcccgggactgggagcgcaaaaagtcacctcgttcccctcgattcagaggacattgaccgaactcaacgtcgccgtcccctcctcgatcgctgtctcttccgatcccattcacctgcgtattcactcccctcatgtcccggacttaaccctggtcgatctgcccggatacatccaaatctcatcgatggaccagcccgaggagctcaaggacaaaatctcctcactgtgtgaccgatatattcaggagcccaacatcatcctagcagtatgctcggccgatgtggatcttgccaactcggctgccctgcgggcgagcagacgcgtggatcctatgggtttgcggaccatcggggtcgtcacaaagatggacctggtgcctccagaacacggcgcgtcgatcctgaaaggcaatcgataccctttgcacctcggttacgtgggagtcgtcagcaaggcaccgaaaggaccgggaagcgacaagatcaggcatggtggagaggcgccaaacattaccggcgcgatcatgcgacgagaggaagaatttttcggaggcgagaatgctcgtcacttttatccgccagaaacttccaggcggggactagggggtgggcagagcctgcaaggcaaggtgatggtcggaacggatactttacgacgccgtcttatggacgttctggagaccagcatgtctggcagtctgaatggaatcaccaatgccgtccagctcgagatggaggaagccaactaccagttcaaggtgagttcggtcaagtgtttggacaaaaagagttgcactaaacttcaaaccccctccccaaaggttcaatacaacgatcgtaggatcacggcagaattgtatgtcgcggaaaccatcgacgcgctcaaagcccggttcaaggagtataccacccagttcaccaaaccccacgtccgagcaaagctccgatcaatgcttgacgacaaggttatggacattctcgagcagctatattgggtggacaagcggacggaagaactatccaagcttgctgaggaccgcaaactcaagcctgaggaactcgcatcttattggcgttacaaactggatacggctagctcactgttgaccaaatcgggggtaggccgggattcgacgcaacttgtcgccgaagggctacgatctctcattgattccatcgccatgggggaaccgttcacctatcaccctggtgcggcggagagaattgttgaattctctcatgcattgctccgtgagcgactcaatctgacggcggaccaggtcgaaaactgcatcaagccttacaaatacgaggtagaaatcgaagaccgtgaatgggacagcggccgggctagggcagaacaggctttcgacctggaagttgcgcgatgcgagacgaaactggcggagatcaagaaaaaggtcggcggagcgtggcgtatgaagggtttgctgggatacgtcagcgacctcgagcagaaagagacagagagagccaggcgtcgattcgctgcagccaatatcgacccaaccgaagtcgagcagtttgaatctctcgatgaaccccatcccgagagttacaaatacagtgcagcgcagttggctgatggtgagcgagctagaggaaatcgaatcagatccacgctgacaccgctcctttgtaggcaaaatcgcggcgctattctctgatcgactggctgtattgaagttgcggcaggccgccctgaaatcgcgtcgctgcaagatgggacccgaacagaaggcattctgcccggaagctttcttgagcgttgtcgcagagaagctcgcctacacgtcgaccatgttcatcaacattgagctcttggagcagttcttctaccaggtgagtaatcgtgcctacgccgctaccggatctttgtctaaagggtactccccatagtttcctcgcgagatcgattctcgcattctgtacaatcttgatgtaagcagcgaatttccatgcaccggtgaaggcattgcgcttacctattccacatctcgatttagcgggaggaaatactccgcttcgctcgggagaatccagtcatccgcaagcatctcgacctgcaagataggaaggacaaactcgaacaagtaagacgattgatgttgcggtaacaccgacatcatctgcttatcacaatcacaaacgcgattgtcaggtcatgcgatcattacagtcactagtcaaccttcgtcaagagaccgaacctcgttcatctcgaaaccagggcctgtttaccaagttcttttagatcgaagctctccctccagcagcagcaaacttctactctactctagataccccatctttccggcaaccttaatgcgagtcatcctcactctgaatgaaaaacgattgtatggtataatgatgaatcacggttgggggacgccgtgttgaacgatacatgaaacaaacggagcgcgcgaatctgacctagatcatatttgccctccgagactgcgcctcaggcgtgagctgcgaaggcaacggctcggtcgcctgcgtgaacgaatggcttagcaatgggtagattcgagatttgaaattttccggtgtacacacctggaaataattcggaggcagctcatggcggccactgatcgaaggagagaccggtataggtcccatgtcgacggccctaccgtggattctagtacggttctggaactcgtcgggagaaaccgcagaggatggtgcgacactggtggggggcagcgctgcgctgtacatattgcccttgtttcgcagtgccgttacggcgcgagtctgcggagaaccgactggtgttccgatcccgggcgggccgtaggagaactcagagccaaatatcgcttccggtggctgataacccgcttctccaggggggaaaagggatctgccggacccagactgatacatctggtcgacaggaacgagcaatgctcgtccaacttcaccaacgctacctcccgaacctgtcgtaggcaccgaaggtccggaacgctgttggtgaattccgccgtacgcgccatggccgtaagatccagattggcccattgtgtgcatataatctgcctgttcgtccattgcagggcttcttccgttttcagacgacggctcgactgaatgcgggtagaacgaggggttctgagaaggaggagctggcggaatgtaggaaagatagggagaaccggcattcccgtagggggtaccagcgtgctgctcaggccgcgctccagaatcccaaggcgtagccgatgcaccatcgctgtaagggctaatcccattaccgtatgggtatttggagccgtcgtcgctggtgagatctacgataggcttttcttgccatcggtcaggttcttcctcacggcggttcttgcgtttcagcaggtacaaaatggctccgagcaggattagcgctattgcacctccgacagctgcacccgcgataagacccgggctcgttccgctgaagtaagacgtcgtgtgttgcatcagctcgagaggacgttctcgcacgtctctgaattcagtctcatactcaccttttttcttcactgcccgttgcacctttgattgcgtccgaagttggaacggttccgacggtcgtcgccgacgccacgggcccaaatccggtttcgctggtggtgctagcggtcataaggctcatcgaggaggtgctaccgctcataccgttggtttgcacgatattggaagtcctcgagatcgcactggccgcgctgacgtcgatcgtcgtggcggttcccgaaatggttgtgacggacgtcaccgggtcgactgagtcgctacaaaagggttgaacatctgtcaggacgtgccgacaagtatcgtatgggtgcgactcacgcaagggtgtaattgtactcgatgtagtcgagatcaaagttgttggccttgtcggtacccaagttctttagcaccagcgaatgtgtggtgttttgcaggtcggttgccaagtagactgagagtgatctttaggaccggaccaaacaggtcatcatgaccttgctacttacggaccgctcctcctttgagcgagttgtacgctccagagaacctatagaagacgatccctcgtcagggtgagctcagagtgaactcattcggacctccgatacttacacttgttcggcgccgccatctagggtgactgagtaatctccgtgattgaaattcacacctccaaagactgccacactttgaccgatgaagctaaataagcaacataagacaatgatcagatcgcataggttgaggtgacgggacctcagactgtcgtctcttactctattttagcagtctctccggcagtgttcatcaagctattcggatggatgccagaaattagcgacgatcttgtcctgcatggtcttctctcttattgcgtactgtccagtctctgcgtaatactgcttggtcgctggaaaatcggatgtaatggaactaccttcgtacgtgaaccgaggactcgcgtcatcgatcctagtggtagccgtcaaagcactatgaaggagtagaaatcttgagtttcagcactgcccgtatgttcgtagctagagagatgcaccgcgggagctcactctggctcgcccagtttagtctcgatctgatattcgtgtacgggtatttgtgagccataagcgaccacatggctgggtgtagcaacattggcagtggcaactcacgacgatgaagtcgatatccatccagggtctcttcgccgtcgtgccttgatttttggaaggcgtgttggtgaatttctatccggcatgcaagccccaaaagcagacaataatctcagtatcttctctcgggtcgtcgacgagtctgctctactcgtactgaccaccgtatgttcgactgtcgggtccagtccaccttgaccgaataacatgacctgcggaacattggcaacgtcgtacccgtcgagggtggcgacctgcccgtcaagatccacctcgaaaacaccatggttatctctcttggcgccatacaaccagacgccggaccctttgaacttgatgctacctgatgctgcttcagtctgagtgcagcggaaggtggagccgtagtaccgcggggtgaaggggtcttttatgatgcgcaggcaagcgcgtgtgagaatcctaatcgacgtgatgcagcagagcaagcggggtagcacctcacctgaattcaaactcccaatttcccatccatccccccagattatcataggagacgtgtcgtctagggtgatattgacactcatcctcgcaacaacttgaaaatttgtactggtggaagagacttcagggatcaaagggatctgatcgcagccaggcgacagtgatgaaggattgcgggtataaaggagatagattcgaagctcagtctgtatgacgccgtacaggaccgtgtttctgcgaacgcttgtcgaggctcgcaaagtcgatgtccggtcgatgtcgatattgaatgggttgaagtggagaaatgatgtgatgtgatgtgatgtgatgtgatgtgatgtgatgtgatgtgatgtgatgtgatgtgatgtgatgtgatgtgatgtgatgtgatgtgatgtgatgtgatgtgatgtgatgtgatgtgatgtgatgtgatgtgatgtgatgtgatgtagtgaacgtgaaaggtcgatgtcggaaaaggcgaggattgcgagcggtgcaactttggttcagtggcgaacctttgatcgagttgaatctgccaagaaatcgtcagcttgactaggtagcgtcacaagggtgaacgggggtcgtccaaacgggtggagctcaggagaaatacattcccgtctttgtggagcgaattccctttgtatatccttttgattccttttatacagtagaccgtttgttttttccttccttcaggtttgatggaatgatgacggcggaggcgcagatcaataccatgtggaactttgggtttcatggctgacgacgacgaaattgatcaaaacgggcaggagaaggcgggcggccacagatcgaatatgatccggaaagatgatgatcatgatggtcgatcggtcgccggcgtttcacgaagaagatctgtaacgcgtaacggaaacccccttgatggaaaaacggaaaggaagcttatcgctcccttggatttcttcgtatgctttaacccgtgctcaacccagttcgagtctttctgtaccagctcttgactaatggaggcaagccctcacaagaaaagtgaacgattaggtatctaaaagtatcctttggaatcgggtcgttaaaacatgcctttatgtatgtacttatgattttaacccatagcttagtccgtgtggctcaatggtttagagtttctcacttctattttcgaatacccgatatgagagggttccgggttcgaatcccggcatggatttctctttttgcgaagtctgaccatctcaattctttttacttggcgcctctcgggaccactcggtcaggcgcttgcctaatcacggcgcccgcgagggaggacgacatgaaattgtcaacggactttcgggataccttgttgaagagctgctcaatgcattgagctaacccctagcaggaacatccagataacctcactttacatcaccttaagaggaccaagtataattggaatagctcactataatgtctctgcagcccgtccgatataccatcctcgatggaggcatgggcactaccctcgaagactcgggacataatgtctcttccaacctctggtcctcagatccggctctgaggagcgccgtcagggacgttcattccgggttcttggatgccggagcagagatgatcgggactgctacgtgagcgtccgatgggcagggtagctgaggggacgctactgatccctactgctcctatccgctcgaccacttctgctcatccccgtcccccgcaacacgatagctaccaggcttgcgaatccctctacacccagaatgacgccatgtcttctcagcaggctcatcagctcatgctgagccaagtcgccgtagcggacgaggctgtcggccagtcgaccgatggacggaaaggggccgagaagaagaaggtcgggttgtgtttgggacctttcggagcgactttgcaaccagggcaagagtgagtcaaggcaggtttttgttcccaattgttgcatcaaagactgatctggttctgtcgcatgcgtctctcagatactccggcctctatcccccaccctacggcccgtcctcgtcatcgacctcgactcccacctcatcctccttcctctcctccatcagctctttacgcgaattccacctctcccgtctcttaacctatgctcaagatagggcgacatggtccaacatcgattggatttgttttgaaacaatccctctcgtgagggaagccttggctatcaggcttgccatgcgggatctggaggagaccctggaccggacgtatggttcgggggaggggaggaaacaggtttggatggcatttgtcttccctggcggcaatttcccggacggatccaccgtcgaggatgtggtcggttcgagcgtcctaccagagccttggggaacacggtcagaattgtctttcaaggacaagttgcagggggaagacggaacggaaagctcgttctccggtcgactacctatcccggacgcgatcgggatcaactgtacctcgccggctcacattcgtcaactcggacgagaattcacccgacatctcggggatatcctgacatcgggacagctggaaaaggcggatgagtcgatagggtttgtcctctatccggacggtggcttagtctatgacacgaccacgcgatcgtggtctgtgcccacaggagtgcctaccgctggtcaggaaggcgggaattgggcgacaaacgtggccatggtcgctagggaagtgggagagtcgacgcgcataatgagctcggcaggtggggctgagggtgaagagaagagggtctggggaggtggtgttctggttggcggatgttgcaagaatgggtttggagagattaggggtttaaggaatgagctgaagccgcaaagtgggtgatctcaaagcctccgttcgaggcgccgggacgaggggttttccatcgcccggtcgataacgatgatgtaaacatgataatgcaattaggtgaaacacgcgaaacccatgtatatctctctgacccagcggcagtctcacgccccgcccatctttctccacttggatcgcaacccggctatgcaggccacggtcccgaacaatcccgtccacgcctgactcgtccacaccccttgataaacggaccaatgcaccgtcaacggcgcatacccgagattggacacggcgtcctcgtaccacccgatccagtccccacgcagtccggccatctgagccccgatcggctcctctgacccgtcccctgtggacgtcgagacggatttcccctcggtatgcatcgactgacgagctcgtacctcgagcgccttttctcggatctggagcgagcgtcttcgttcccacagggcaacgaattcgagcgcgacgtacgccatccaggctcgacagctccatacgctccaacgcagctccctagccggggagagggggaagactcccttgctagataggtaggagaggttctccagaggatagtagaccaggagtgagatcgtttggagcgaggtgaggagtgtttccgagggggtaaagagggtcgggatggaagggagcatagcgatgattcctgcaggggtgcggtgaggcaggatgggtacgtttatcaatcacccgcagagacaaggagttcaagagctgcagctgacctagtaatcgcatcatggtccttgcgtccgagacggatccgctgaggttggtcagatccgtagcgaacctcgtcaacgcacgtttcgctctcttggagtcgctacgtctgacgaggaggagcaagaggggtacgatgatccgagcggggtattggatgagcatgagcgtcttgtcgagcccagatgtagaggagagaaaggtggccagattggtgggtgtcagacgtggggaagtcgaggggaagaggagatgcttgatgagcgaggatgagggtttcctcggagcaggcttttcatagaggtctgacatggtgcctgataacgtcgttcgattgatgactttgggtttgggaatgtgtcgagcctgagcgttacagacaacgtctattctgacgttctgtcggtattgcgctgggaagtagctggcagcttttgtcggaatggttggatttcaggtctagtatggatcaagtcggtggtgactagaagttgcatgagttccggttatcgtcgccaaaacaagattccgggtaacgtcattgcacttatctcatatgccggcaccatcaaattcagatcacgtgagactagctcgtgtcgataacgcataaatcaccgaggttatgcgttttaacaacgtcccatcgccaaggagctgttgggagatgcgggaggaagggacggctgggtggtcatatgatgggtggaatcgtcggtcaatcgatacagagagcgagagcgacaccacacagatcgttccgtaacaccacatctcgcaccggattacctctgatctccagcaaccaactacgtattaggagctacgcaaccggtccctgcaccatgtctaccaatacgcgcggtctcacacgctcaccatcaccgtccatggcggccccttcacctaaacgacaaaagctcaccacggacccagcgggtccatcaacggcctccccgagcaggactgcgaatcaaccaccaccacctccagctgctacatccttcccatcgacagcctcgaccgagctacccgtgacgtttccgtcgtcgggttcgacgtcagccgtggtcgaggacgaacccggcgtacgagcgctaggagccgtcccacccaatggcgcaggggtgaccaaagtcaacggtgccgacccggtcgatctgtccaacggctcttcaacgtcagctcgggtggataccgacgatgtcttgcttggatcaaaggaggtcggcgggtcgaacggcgcgacggtaccgacaggtcctagtgctgctcaagcgcagaaagtcgaggaaagcgacgatgaagaggtcgaagagctaccagagcctgaaaaggaggaacaggataccatgcatggggacatgtacctcgataccgtcagtcctcgttatcctgccccccgactcattccacttgtttgctcatctttttttacctcattccataccccccgtcgccctctcgcaggtcgctcgtcaaaacctcgaattcgatttcgaacgcctgtgttccaagtccatgaccaatatcaacgtctattgttgcctcgtgtgcgggaaatacttccagggacgaggacggggtagttgggcgtaccggcatgctgttggggagaaccatcgggtgtggttgaacctagggaccgaaaaggtgagggcgacacagagtaggctgagagggagagagagcgacgaagctgatattggagtctcggatgaccagttctacgtcctgcctgatggctaccaagtctccgatccttcgttacaggacatcatctcggttctcaacccgcgttacaacccggatcaattgtccaacctctccctcttgcccagcaaatcatcctacacgctcaccgcccagccctacgtccccggttacatcggactgaacaatatccgcgccaacgactatatgaacgtcatcgtccacctcttgctccacatccctcccgtccgtgactatttcctctctccgagcacgccgcagctgcagatggaggcccgaccgaccgaacttatcaaacggttcgcgagtttggcaaagagggtatggaacccgaggttgttcaaggcgcaggtctcgccgcacgagttcctgcaagaggtcgccaagcgtagcgagggcaagtttggaatgaccgagcaaggggatcctgtagcgttcttggggtggttgttgaacacgttgcatcgggacctcggtgggagtaagaagagcaattccagtgagtggcctcgtcacgaagagtcggccgttcgctaggccttgcttgctgatcccgaacccatcgcgatcccgacctcaggcgtgatatacaagacattccagggagaagtccggatccagacccaagaggtcattgtggacaagcgagcgtcaagaccgatctttgatatcagtcgggatatcaagacgatcaagtcgcccttcctgttcttggcgctggatctaccgccagcgccgatctttcaggatttgaacgagaatcggatcataccgcaggtgcctttgggggagatcttggccaagtacgatgggatgaccacgcaggtgagttgctagttgagtggtagaccttcgactcggttacagagctgatggatgaccccgaactgaaccgtctcgcctcggccgttctaggaaatgggcaataccctgaagcgacaccagttgacgagactgccaccttacttgatcctctttatcaaacgatttacgagcaacaatttcgtcaaagaacgtaatccgaccattatcaactttcctcttcgggggatcgatttgcgggatcgtaagtccagcccggtctgtgccgatagttgtagggatggtaaggcgagactgacgccgttgattcccgatctcacccatgcagacgtcgacccaaagccttcttcaccgatggcaagcgtgtacgacttgatcgccaacattcctcacgagacgacgagcgcgtcgacaaacgctggcggatcgggatcgtcctcgaaaaagaatgaccgggaagagggcgataccgtgtggaaggtgcacgttcgagcgggtgcaggtggaggcgacgccgaaaagtggtttgcactgcaagatctagacgtttccgaagtgcggaaagagatggtgtttttgggagagacggtcgtccaggtgagtgctcttgcacgcccgctctttatgcacggctggacaacggtgctgacacgttgcgtgtcccttgccccgcctcctcaggtctgggaacgtagagacgtcgaaatcaaggtatagcggaagcgatccgctcggcccctgtatcaaacgaaacatgacacgcttccccacccatgcttgtatcacgagagacctttacgataaggaccgatagagatgcgatcgatcgatagaccactgcatgaccgaggcgaagcggcggggataggacctacaatcgagatgtagcgagggtgacagttccgcgacgtcacccgctttttcgcatatcgttcattgccggaagcgaggatcgcacctggctcaagtgcaagtcaatatagctagtgagactggtctagttgatggaagtatgcggcgtacgacatggctgtgtcacgcttttcgagtttccgaggcaagcccgtgacgacacgcaacgacggaacgcccttgccgtacacgctgttcgtcatgggcatcgccgctattgccatcggtttgtatcgctcaacgatttatgcatatggcgctgagcgggctgggtatcgtttcatgatcgaatagttatatacaaaatccagatggtgatgaccggaagagagctcgtcaatcagtcgtacgtgacgatgcggtatggaattcagcttgcggtatctataagaccgttcccggaattgtcagcgaaaccgcgctgtaccccggctttcaagagcaagagcacaaaagaagcagactgacagtagtaaagattgtccaccaggtcgacgtgatccctgaccaaggtcgcgatcaagttcaacccccatacccggtccaacgcgttcaacacggccgtcgccttgggtctggtgtatcgctgccagatggaccctcggacgaggtaccagacgaggtttgaatccctctcggcgtacgtctctgccaagaggctcgtcatcccttcgtccccccgggtgggtcgtcgacgtagccatcgggagacgaggacgtagacgagcgggatgaggctcggcaaagtcgtcgatcgggcgagggaggacatgctccatacccctgggaccgtcggggagatggcggtgaggcgggctcgacgacgggcgacaaagaggtaagtcaggatgcagaccaagccctcggtggcgtgcatcgtctcgcctagccattccctcgcgccctggagttgtggcaagagctctgatggaggggcgcgaagggaagcgggtagggcgtcgttcagcgggaggacgtgcgattgaagtggagctggcgggagggcggggatgctaggtaggtccgggagggagtcttccaggtcaacctgagggcccgacggtggtgttctcgatggaagcagagatggatccacctcgcgccctgggataggagaattcaaaagtggccgtctcgtcacgcctagcaagaccaatcgcaatgtcgacctatcacggagcaaagtgcagtcccccccggatcagctcggtcgactttcctcgctattcgcggcgcctcgtttgatgtcactcacttgacgccttctagccacaacaagacgtgccatcgtctcttgtcgccccttttcttcctgacgatcatctcggtcaacaactgcacatactggataaagaccagcgtcctgctcgcccggttgtacaccggcgaagtctggcaataatgccgcgtgtaccgggaatgatcagagggaggagggatcttttgacggtccgaccatctttccgaagaggcggacgtcgagctggaagctgcgtgctcggtactttcggcagggtgaggttcgatgttcggtgaggtgtacgtgtgaacggccgggaatggagagggtgggaggggagagatctgatccagccgtcttgcgatcaacgagtcgtgatagatccctacgattgacagggccgagtagactatcgacacgggaagactcatgagtgtcgctggtctctactacagatagatgaacccaggaacaagtcccactcacgcccttcactggcgatctcggcatcttcgaacctgccgggcaagaaccaggtcaattgcctcagtgtgctctcgaccgtcgtcaacgtggacgagctttccaaaagggcgttttcgtaagattccttgatcttgcctagcatggtgtctactcgctactcgcgctcgctcgatagtgaagatgtcgacgattgtgcgagattgaaagagagattaggatgaatggacgagtgacctgacccgactttgtgactcttgagctcccgatcccggttgaatgatcatctccggattaaccgactctgacctcaagggcaagggggaggggggaggggggcagcctcttcgccatcctcacgttcctcccccatccagcccactcacagactaccgcaccctctaccctccctcagatcgatttcggacggatgggcacggtcaccctcacgggatctttcgtcgggctggatttctattctccagactccgactccgactccgggtctagcgcggcagggggtacagggtcgacagagggggattcgttgatcctccgtcgaacgggacaaaaggcgagcgtattgggacggacggacgagggtggatcgatcttgacggtctgtcccggttcttccaccgatgacgacaatctcgaggtctacgtaggagggaatttcacgaggttcgcaggggtgcaatcgagggggttggtcagggtatcagtacccgctcgacaacaacaacaacaaggagagggtaccggcgtacaggtcgccgcgatagggtcgggagcggatcttctggggtcgacagggaaggacgtccgggcgttgtattgcacggacagtgtggtctgggtcggacgatccgcttcgatcccaggtgagaacagcaacaacgacgacgacggtaacaacgtcttgctccttgacccttcgacgatggacctctctctacccccgtttaccggtctcaatgggtccgtgacgtccatccgaggctcttcgtcagacccacaggggatcatctttggaggttcattttccacactcttccgcacggatgggaagaacgccacctctataggggataacgagacgacgacgacgaccacgctggacgagatcctcggtgcctacccgggcgccgcacctttcggcacggtcactacggggttctccaggtacttgaccccgctctcgttgaccaacgcttcgatcgatgcggggccgaacgattccacgggggcgagtatcaaggatatcacttgtccccaaggagatggagcagggtcatcggccccgacagagacgtattacgggagagacgggagcgcggtcaaggtcacggtcaggttgttcagagagttgagagcgaccgggatcaggttggggaacagtttcgaggggaacaaggggacgaccgggttcaggtgagtcgaccccgcgggtctcatacgataacgggcgtcgtcagagctgatccgaaccgggaacttttcgccggcgtttagggtggtgaccatcccggacaacacgcaacggaccttgatctacacggacccgagctcggggcagaattcgacctgctcggattcttgtcccctatcgacgaattccagcatcgtcgcccaggatttcatgttttccgacggaatggagagtatcaccgggttccaagtctacctcgaacaatggaccggggatggcgtcggattgagtcggttgcagttgctctcgagtggggggaccgcctcggccgtctctgcgggtaattacccagtctgtcgatcagggtcgtcggacacggcttcgtccaacgtggaacagaccggccagtggtcaaacacacaggtcgatacgtccatctcggggaccgttcaatcggtcaccgtcgcttcggttcccaacggatcgggagatcgaccgagcacgacgtggtacccctacatctcgagctcgggaaactattccgtctacctgaatatcccggggtgtcagaggatggggaattgcgcatccaggacgagcgtcgatgtcggcgtattcccttacgccgggagtttggggtatacgagcaccgtccagcagacggtcgatcaggatacccgggagttgatctactcgggctacatgcaagggtctcaacaaggagcgtttcaatccaccgtcaggctcgcactgggttccaacccggcgtcgacaagttcgggcaggtgggaagtcgtcgcgggtagcgtcacgctcgaatataatgccgccgtcacccagaacgggactaggatcccgctcgtcaccgggctcaaccagacggtcacgatcaattcgaccgagttgggcaacttgacgataggtgacgctttgacgaggagggcctttggtgttttcgaatggaccgaggggggtgccgatgtggacgcgacccgggtactgggcaacgagaccgagacggacgtgacaaggctcgggttcgcccttcagggggcgagggagggtgcaaacaacgcaagcgtcagggcgatcgtcactttgaacgacattgtctatgccgccgggcaatttgccgatcagggcaatttttccaacattgtcgcgctcaaggacgggaccgtcacgagtcttgctcagcaggggttgaacgggctcgtcacgtctgccgtggcgagtggagaccagctgttctttggaggcgactttaccggtaccgctcagggatctaccaccctgaaccgcttggctcgatacgacccggccaacggcagctggttctcgctggctggaggcgtggacggcgtcgtgtccgccttggaagctggttcgaacgatcagatcttggtcgtgggcaacttttccaatacgatcgattcggacggtacgacgacggctacaggaggctatgccgtgtggaacaccaaatcggaaacgtggaccacctcggggatcgtcgtcgggtctgtcaacagcatcgccctcgatgacgatcagacgttcattgcaggacggatcctaggtgtgagcgataacgcagtcaacggcatcgcttacctgtcaggcagcggagaggacgcctcgatatcggcggccgacatcgactttgcctccaacgctacaactagcaatcctgctcgaaagcggagcatccttccgcacggtcaccccacccgcacatggatgaacaggttctcggaagcgctcaggaaacgacaggcgtcaactccagcgagcactcccgcagctgtaccgcaggtgggacccgaagcgccaaccattctcacggcagcttactggaccaattcaagcgcctcgggtaatcttcctatcacttgtatcggtggaaactttagccttgccgaatcgcggggcacgtcgctcgggttctacaaccaggagacccagaccaccactccagtcgccggacaacagccaaacgggatcgtacgaagtctcgaagtcattgacgatacactggtcgtggctggcaattttgtgctcggtgagcagaactcgatcgcgtcctacaacctggccagcaactcctggaacagcgcggtgccgggcttgaacaatggtacaggcgcaggagacgtctatgttgtccgcaaacagcccgacgccgacatgctcattgcggccggtgcctttacgacggctgggtcgctcccctgcgtgggggtctgtgcctgggatctcggttcgtcgagatggtctgcgctcggttcaggtctgtcccgagggtccgttcgtaccattgaattcgtcgatgtgagtgtctctcaggcaaagagttcgacaaaccatcctgacagctcgcgttcctgcagcaatcgctcttcatcgcgggtagcttcaccttgtctgatggaacagcagcatacgttgcccgatatgatttctcctcgtcttcttggaccgctttggccgggggcgaccaacttccgggtcctgtcactgccatggcgcttgacgacggtgatgtcaacaagatttatgctgcgggagtgtaagtcgattggatacaacctcatgataccaaacggccatgctaatcgcaaatctcctccagatccagcaacaacggtgacccgtacgtgcagcgatggaacggtcagatatgggaaacgcaaggtgagctgtgatgctggtaccgcagctaccgtttgcgagacattgacttgcaaccaatatacttcagaacctgcgcctctctcgggtacccaggtgtcttccatggtcatggtcccgctcgccaccgaatacagtgatagtcagatgatggagaaagatcgaatgcttatggtcgtcggatccttggtactccccgactcgggcaactcgactgcagccctctatgatggacaagcatggcatccttacttgacaagcgtcgggcgcgacaataacggggccggcgcgagcggcctcttctactcgatccatgacttttctttccacacacgacgtgagtctcatcatgaattgccttctggctcccggcattgacccctaccttttcatagactatcttgcgctgggccttatcgtcctgattgccattgccatctcgacgggactcatcttcctgttcgttttactcggactactgatcgtattttggtggagacggcaccgcaagcagacggcaccgccgcctgtcgtgaccacattgatggagaagcgaccaagctcagattacggcgataccgatagccttcgcttacgccggctcgacgcgatccagcaggccgtctttggctcgacagcggtggcagcaacatctttcgcggctgccagcaaagcacaatcgcctcgcgacatgacccatgatgatacgcggtcctcctttggctatgacagcacgagccagggtcacgcgatgggtgcgcagacggccgacacgcatggcgagtcgagttcaccttctcatatgggccggccgacgaccgtcaagtacaactttgaggcagtcgacccggcagagctttctgtgtgtgaaggtgaccatgtcaacgtcttggaagaagacgagtcggaacagtggtggtatgtacgggacagagagggaagagaaggcgtggtccccgcctcgtatctttggtaacgacgctacacgatcggtttgacaccttataatgaattatctttgatcttttacgaccttgtaacgagctagatagacgatagtcttcgcatggactggatgcatgcgctcgaaccgtctcgaacgtaagatccctacagatcatacgcgtctgctggactttgtcgtttgtgagcgttgttagcgggagaagatcgcgtttcacgggacgagatcgaagaaatacatcgactctttgcgagacaccgtgattggacagacgactagtttccgatccgcttactacatcgatgaccgaacaggctttttcaaggatgcgcctcgaaaagcaagactgaagtgtcggtggaaccctacctgggcctcccaggattttcaatggatgtcgcaatggaacatccgatggacatactggataaagaaccttttgtaggccggatatcctgatgggactgcgagccgcgtacctttcattaggggctgcgaggaattatggtgttcccctaggcaggacaaacgtaccgtctcctcggcgagcaagagtgtgacctgctagagctattctttcctgctcaaagacgccaatatgagttctgttcattccatcatctatacaactcgaatttattgatttggccatctagggcatactcttgacggtatcaaagatgatacccaaagccttcccgaccatttcgttcatcccctcatccccctctttcggacggaattcatgcaacgtccttgatatcgaagccggtgcggtctctccaacctctgtcccctcctgctcgtccgccttggctttccctttccccttgtccccgttctgcgacttctccgccaacgcccctgtctcctcctttgcctccaactccttgaccttgtcctctgcccacccaccccgtctctgctcgtcgtccttttcccactgagtcatatctccgatgaactgcccctcctcgacatcacccgccgggttctcgaacatgtgtctgtgcccaaagacataggccggccagaccacgagggggtggtacgatggcgggtctgtccatacatctccggctgtgacaggaaagatcggaaacgaggtggcgcgtagagcgaaagtggggcggaaaggtcgggggtgagcatgtgtatgacgagaagcggatcgatggggttcatttgggagactgactctgggtgacatattgcgctcgggtttctcgacgggtacggagcgtctctcttggtacacggaggaagaaggagacgtcgtacaggggattgcatttctgtttgaccgatccgtgtagagtcggaggacggaagatcgagtgagcgagcggatgtgcgttcacccaaggacagagaggcatagtggtaggaatgcatcagcggagattgagaaatcgcagaaggccatgcggggagagccgactgacctcgtcccaaaacagcaggaagccgtccacaaagccaaagacgaccctctccccatattcctgctccaattcctttttcaagccctcaaacctctccttccatccgaggacaatctcgtccttgaccccaacctgatctttctgaacgttgaggtgatcgtgcgattgaacctcgggcgagggttcggcgtgcattttcgagtagacgagggaacggtggaattgtttccactggatggctgtgggcgggtggtcccagtcttgccattccgggtggtccggatggaaaggtaagtccgcttcaggctgccatcgaggagaacgaacgcgatacgagcgggatcgtcggtcagccttgcttgaactatacgtgtcgtatcgtgttgaaaagcaaaacgagggtggtgtgattggactcacaggagcgaaatcgtcttgatggacgataaaccagtcgccctcgggcaagatcttacagaggtgcttgacgagggaggtcttgcccgagcacgtcggcccgcccaccgcgatcaggacggtctttgtgcggatagttggtgatgaagatgacatggtggatggtccttatcgaatttggcggtgaacggtgcaaggtggttgatgtcgatatgatgtagttatgttatcacttcgatgttcgtcgatctcgtcgatggttgctgtttgcctgtggggtctccaagcaaagttgccggaactttgtcaacctggttaacccgggatttatcaaaagacgaaaacactactctatgcccagatgcacaagccgttgacagcctcaacaaagtccttgtatacgataggttctagtgcagagtgatcggttgtgacaagtggtattcgtcgacctgctagtaaacgactcgactcgacccaacctcctcggtcgatcttcgcgtcttggaaaccaaaaaccggcgatatcctcttgtcgacctcgatacgcaaacacaaaatgacaagatagtcctcttcctctgcaactattcaatcctgttcagtcatcaccatctacaagttagacgtcaaagatatcgagccttccttcgatcgagcggaatcgggatcgatagactcagccccgacctcgtcaacgatacatcggcacaacctcccaccaccaaacgacaaccacgtcgaagacaaccctatgaacgacgatttgcatgacgatctcaacgggatcgacatgcccgacatgaacatgaacggcatgaacatgggcatgaatccccgcctctccatgtccaactcgatacacatgaacatgaacatgccgaacatgagcatgaacgtgccgttgaacaacaacaataataacaccatgaacatgccaatgaacatgaacatgaacatgaacccgcattctcacccgcattcgcattctcacttgtcttccatgggactcaatctggatttggacatggacatggatgacctgtcggacgatgacatcttggcgacgtcgatcgggggcatgagtagcggttcgctggatgcgcagaatcagcacggacatggggctcaagatcaggcccatgggaagggtggtcatttccaaggacctcggagtggggccctcgatggtatccgggccgtatttgaaggtggacctggtaataatgggaacaatggcgccaatacgggtgggcataatgggaatggggagggaacggtcaatacgtccgacttgacaggagggaggttcgagatgacgggacatggggccgtaccgcaccaagcaccacaatcgtctacccaggctcaggctcaacatcaacgccaatcgcagcaacgaccaccccagtcgagctcgaatcccaatccatcctctggtcctgcacctcccagcaatccagcaccgccgggcctgtcagaggaaaaagcccgggcgctcgaagccctcctcgtcaaattctggacgagacagatggaccttgccgaacggggctccgagggcgggtcgtcatccacgcatacgaacggtggcagtagtggaggtggggttagggaaaccggtggaaacggagcgggcaaggaagagtttaaaaactttgccttgcccctcgccaggataaaaaaggtcatgaagagcgatcccgaagtcaagatgatcagcgccgaagtacccgtcttgctcggcaagtgctgtgagagtgagtcgaaggtgtcattcacggcagaagcaacgaacattccgaatctgacgacatactgtccaccccgacctcgctctgatcagtctttatcgctgaattgacttcaagagcctggctcgtcgcgcaatccaataaacgacggacattacagaaatccgacgtggccgctgcgatcgggtactcggacatgttcgatttcctgatcgatatcgtcccacgggaagaggccaagggggttgggatggacaacacgacaggggcaggcggaagtgggggtaacagcaacaacaacagtggtaccaacgccaacaccaatcctgcaagtggaggcatcgggaacggtaatgggtcgacagtaacggcggtagctggcgcgggcgtcaagagaaaaaaccctggggacggcgaggacgagcatacggggaaacggcagcgcgaggacgaagacgagtcgaattgagaggatcgaccaattgccgcttgtaacctgaagagcgcatacatcgaacattgaatatgatggtgcgcggagaaacgactgtttgaagaaaggaacattggcagagtgcatgcgatcagattctcgtctggcgaaacgacagccggctgtcgatcgtgacgatgtgataccgtcgaaggccattcagatttgtccggctcggctgcgtcgggtaagggccaacgaagggtcggtttggactattatcagaaacagaatgtacgatatcaactctggtgtagcgaagcatgccgctcgttgaccgactcaccagggccccagctcgggccggttcccgatgcgggcttggagtctttaccgccaccagccatggcgcgaatcaagtcccccttgcgatcgttggatagctcccagacgaacatcccacccagcttctctgtgtcgacaaagtcgctcttggcctggacagcctcaacgctgtcgtatgtcaagaccaaatccttttccttgttccacagccagctcccggcggtagcgttgtcgaattcgtacgtccagtccgagttgttgaccgcaaacgcctgttggatatgactatactcaaagctgccggtccagctcatgttgttctcggcagtgtcaaaagtcccttgaattcggttaccttcggtcgtcatgttaccgcccatcccagtcttgtccgtgttgtaaaacatataaccgtaagcggggataccgaggttgatcttgtgggcggggatgccgatctccttgagctgagcgacggcagccgatccggaaacgtcgccgtacaagggagcgtcatgagtgatggtctcggaccagtacccggcaaagtcctgtagttcatacccaggttgtccggtcagtaagaccatctcgtgctattgagcctcgactctgactgtgactcacgtaggccatgacgttgatcatgtcgacatacttgtccatctcgggcgagaccgaagcctggagcaacgactggttgttcagttcgggagcgatgatcgtgctcgagctgacggcgagcgagatgatcttttctcggccaatgcagtgacggagttctttcataaggagaacaaagttctcggtatctatcaggtcggtatggtcagtcttggaagatcgtcaggatggccgatgaggactcgcctgcgagactcccattgacacgttcagcggtagggtactcccagtcgatatctgtgtgaccagagcgggtatgatcagcgcccagccctttcgacgtgacccccaatgacataccgatcccatccaattcccactcgtccaagaaccctttgacgctctcggcgaaagcggcccttttggtctcgttcgcggcaacgctcgcgaaattctgggaccacgtccacccgccaagggcgaccatgatcttgaccccttccgtctcgttcttgtgctccttgaaccactgaagaccgatgtccgaggagatgttcttgcctacggggacgtcgaaggggatgcccggttggagcgtcgctttgagaggggcctgagggtcttcctcttcgggtggaggtcgggggtcaagtgagtcgacgatcttctgcttttcctcgtctgagcagcgaggtgaaggagagacatgcgcaaagcgattcaccagattagcgtcacccacgcaaagagtactgggcggtcctgaggcttaccgggaatcccgtaaaggtcgatatcaggatccccaacttcgatcttgccgtcggttcggaggtagatgaaggaataccaaagatgggtcaagtccttgtaaggaacgtcggaaaggtaccacatgggttcgtaggcggctatagtttgcgttaccgcaccgaatagaatcgagatgttttgtcagcctggagctccgagaaacagaaaacagctgtttcagacgtaccccaactggcaatgtagcctccgacgacacgttgaggaacctctgcactgggtccgcagcgaggagcaacgctgcgtgccgaaccaaaggtaatcaggctgacaagtgccacaatggtattgagaagcatgtcgagtcagctgtggatagctgaaagatgaagttgaagattgaaaagtgtgggtgtcttggacaagaaatcccaaagacgcgcaagagcagactttttgttttcgaggaggaaagagggattcggtttacaccagaaattcccctggttcttatatccttatcctcgtgtatgagcttgtgttatcttgttcgcgggatcacaacaaaagagcgagatatgtcatcatcgtcattcggtggcgaatccccggcgatggctccacatggcgcacagacgaaacgttccatttcctttgagacatcgatccacattgaccgtatagctacgcctcgcctccgttccatcgcgcgatcgggaccctcctttgaaacctgaaacaccggtgtcacccgagacgcaggggggtttccggcaagatcgcgcgcggcacggcacggcacgtcgcccccttctttcctaccacacgccgacctcggccacacgttgacgtttcacttcgttccatgccatgcttctcgatcatcgagatggaagttgccagatgagaactcatcatgaaacaagtagtgtggggtctccgtttcgatgcccctggagattggcgcaaatgcgcccgataagcgcttcttctggctcgagacatcctataaccggacgccctccttaaaacatggaactcgaccagatgatgtcacgaatggtctcctcccagcttatcacctgctaggcagctgaccaaaggtagaagatgagacttcccgaagaactttatcgacggattaatagaccaaacactatctattctgtaatgattgagaagatacctggtcagtcatcgcgaggcattcaaaaaggaacctgttcaagccgtctcatccgaacccggcagtgtcattcctggtgagtagagcgatcttcgcaacgtgatttgtctctcacgaggaccttgtcatcgacactcaccacggtttcacgatgaagtgctagtaacggttcacgtatcgtatcgcgagatccttgctggctcgcttgtcttgtgcacaagttcgagcaaccatacgtctcgaatccgacgggtgcgactgtgctaatgcaattcttttgtcgagtctatactcaaatacaaccttcgctcctatctcatatcgcgcgactccgagtcttcttgcctgtcggtggtgttctctcttggaacgcatctaccagttttttcctctcttgttccgctttcgggtcgacatacatcacacgcatcgaatcgtcggcaacgccggaaggatcctccatctcggcatcgagcgggccgggatgatcctggaaccgatcgctgtcgttcatggcttccagaaagggatttaccgtgcggcttgaaagtgcctatataaataagccaaaggtgttaatgccgatcgctcagagcggccgagcagaggtacttacagatcggggccgtccgttgcgatttcgtcgaggctgtccgttttaaatgtagctgtcaacaaaggtaccgagtctgacacaatgaatgactagacgacttacattataagcctgggccttgcttggctctgccggaccggatcgattgccaattttggccagaccttccgcctcggaagccgtctcgctcagtgtacctctcgagatcgaccggggagggcccatatcgccgagattaccgcccacatccctcgtagcggaacccagctgcacctccgcaggcccggcatccgttcttatgggtgtcgctcccgtattcgacgacgtcgatgtcgaggcagatgtcgagcgaccttttgtcgatcgttcgtctgttcggccttcccggtgattcacatcgaggtccatttcggttggcgcaaggcccagtttacgcgacgcagtcgccgatgctgtccgcctagctgcagcaggttcgttctggccttgatctgagccaggtctaggtgagtgcgagcttcccaggccgaacatgctgcccgtgtcgctgatggtagataggttcatggtgcccgtcgcctctagccttggcttcaccaagcgttccagaccagtcttttggctgatttgtgtagtcagtggttccgaggcggtcctcctcaaagcctcggtgtcgccttcaggctctggctcgggggttatagcgtatccactcaagggctcgagctggcccgatcgagccatagaatagagccactctgcggtaacgatcggaaggttccactcgacggccttgttcactttgagtccatagttgcgtccagagactagagccgttgttttgctcttggagaacccaggagcgaattgggcgcctatgacatcggtagagatcgagtcagctcgtgagtacggtctgtaatccttgagagacttgcctaacgccttgatgagacgcttcaggtagtacaaattctcctcgtcgaagcccgacagatgtatgacctggcctccgatgcctgggcgcgattcggatatcattagcgacatgcacatctacctatgaaaatctctcactgaccttgtatcggcatcggctttggcaacggccgaaatactaccgaatcgtctggcgaacatagacggcgctcctttaaacatctttcaatccagcattccgtgaccacttgactgtttgccgcgtaattcacttcaggtggttgcgaattcattctaaattatgccgtacacaagcgcgaatcagcaaggcttcgcgaccgacctcgcccaggttccgctctgctcacaatcgacagacgacgtagtccgctggttcaccatcctgccactgagcatagggtaccaacgcccctcccatccccctgaccgcgtcctcgaacaactcgacgggaccttcaatttgatgagtaaaggtcaagccttcaaagaccgtcgggtcgtacgtcgagctgctggtcgacatctgtcggctcggaggcatgcttggctctttcccctttgctgaaaccgaaacttgggctgggcccaatggtgcggccgaccccgaatccgcatctttcgacaccgagggaaagactgtcggtttactcggacccgcttggttctccccaaaagctcgatcacggctcgtatcgattatggatgatctcgtgcgttgctgatctgaagtggttggccggggagcccaggcggtggccatctctgtcgagtgagctttcgcggtccgtgctcgctttctcgccgtttcgggtgagggcgacctcgaacccgatttcggtcccttatccacgggttccgtcttgacaagcacgccagcgtcgtgccccgttttcatcggtgatcgatcgtctctatgactcacgctcgcgatcaagtcatcgaccaatcccccgggtcctcccgaagtcttggaacgtctcgccgccatggtgctctgactctcccgtggccttttcctgatcagagcgggctcgagctcttcaggtttagcctgcaactcttccatgtcgagcataccgagctcgtcgggcgccttttcgaacgggtcagacgtgtcttcattggccctcatggcggcttgcatcacctgcttggctcggtccatctcttccttctgtcgggctttcctcacattttcttcgaggtcggaacagggctacaacgttagaagcagcctggtgtacctgatatccgaacagagaagtcgtcgctcaccttgataggtataactcttttcgaatctcggaggttcccggaactcttcagcgttccaattatcctccttgaacctcccatcgaattggagacagtcccagaaccacccttcccagacgatcttgatccccctgaccttgccctccatcccggcctggatggccccgggatcaggtcctaccccgcccctcctgctccacacgtccgtcaacatgcgtaaatgttccctctcctcgttcgcctgcgcgttgacttggaaagcccaggtgaccttggccgaggagagcgggttggctgcgttgggcttcgggttcgagacgatcaggtgggtgcattctctgttgaggctaggcgagtattttccaccgaggtcgccgatcttttggatcatgctttgtcgggtctcggctgcgagtaaaggggaagaggtaccagtcattgagggaacagtgtcgtcattcagcagactatacggggggatgatggaaacccgcttcgactgacctggctcgatcccagagactgcgatcgtaagcccagcaaaagcctccaatttgtacctagtcaacgactaccagtccgaaccgacatccccatcagtacctgggagatcacctccttccttcacgcaggagtgacgcgggaactcacgtgaaccggtgggacttcgagcccgctcagccagatctcatggaccgcatcgatccagtctggccggaagatcgggatcctatactcgaccgaccgctaacattcccgtgagcaaagtgacgaaagaacaagaacgtgctcctcatcagcaaacaccatatttaccgctatccgcctgattagggcaggtcgaagaagcccgggatcgggttcgggatcgaagtcgagatcgagatctggatcgagatgctcacctcgtatttcaaactctcatgtccccgacttatcaaggccgtggcgtccagagtcaaatccatatgaatatgcttgacgcccatcgcccggagcttttccgacagggcgggtttctcccatgtgatccccgtgaaggagacgacctggtctcgaaacggaagcgaggtcttggcgtgggatagctctgggtcgaggtgatcctctaagagcggatgaagttcagatgcgtaaagagcacgggtgggcgggtggtcagcgccgtccggttcagaatcccgagctgggcagtcgacatggctgttctttcctccggattcctatttgcatgactcacccaacgtgtcctcgtcgttcaacctcctcacgtgttccctatccatcatgttcacatcgtactcctctgcctcgaacctggatttcctcctgctctggccttcttgagcttgagcgggtgcgggtcgtagtttcacattggcgactttgctcgagaggtggccccggcgggctcgaccgagtgaggccatgggcggcgagcaagtctagatcgggtggacctggagcttccttcaatgttgaacagcaagaattctttccggtgtgtctgaggttgtttgtatggttgtagatgtcgaccatcgcatcgatgtccatgagatgatgacaggtctgagtttgcggtaggttagtgtgtctagctatctttgtcgcgtcatttaacttttgaacgcgtcgaaagggaatcagacgcgatcaaggggacgatgatgcttgatcatgcatatgcttgatgatcttgatgatgagtagtgagtagtgagtagagtgatagtctatcaccttgcaatgataccaggtgaaagcttggaaggcagtcctatcacttactctgtctcggcttagcgctcaggatggaatacgaaccaaccatcaaagatagggttaggatcgcgctggtaagcatagctcgacctctgaacgcgcttgacatcgtcgtccgaaactgatgacgattcccggcgtgtcgacattcgtacaggccctgactatcgtcgagaacaaggatcaacaagaagatatagaaagtgagtcatcatccgttgtgtcttttgaaggtgtcaatgatgataggcactgagattgatgacctcgattgaaaatggatcgactgtagcgtgcatcctgcgattccgcgacaagttcccccagccaggttcctatcatcacgatcgatgtaaccgttccttaccatcccgagcccggagaaacgatcacaacgatgttcacgacgatccgaacgagatggagcgctcagactgccagtggcaagcgaagatcaagagcgtgcgagtcgagatcgatagcctcaccaaacagctcgcggagcgcgatgcaggtatgcccccccgggcatcccatttacacgctcgtcaccacccgtcctcctgtccactgagaccgattcgaccgtaacgacttttcacagatatatccgtcttacacgctgatctggaagcggtccaaccgatatccagacccccaccgaagaagaaacagaacaagtcgacaggcaccgatctagggcaagatgcatcgatggaggtgacgatggcggatagcgcaacgaatttgaacgtaaagaagaagtccggaagaggcccaggtatcaagaaggaaggacagtcacaggctcagggagaggcagaaggggtcattcagatgttgagcaggaagctggacgaggtgttggatcaggctacaagtacgagaggtgttttgaagaggaaatgaagctgggcctgagactgacccacccggtcacttacgtcctagacgggattgattctacaaatcgcaccgctggactacttaccaaactgttcgacgcccctatggatatcgggcatgagttcctacctctccgcctcgaggccatctttctacacgcgcaagacctcgtccacacctgttcgatttacctcgaggctagcatcgaggcgactctacatccgagcaccgcatcagtgaagcgctccatctcttctcgggtgcggcatccgggaaggctcgtgcagatgattacattactcctccaggccctcttgcccgccctgtcccgatctatcgaggccatcacgagcgagatcggggcgcagccgggattcgatcacgaccaactagagaggcggtacagcgatttgatcgtgcttattggcaaggaaatgatcttccccgctatcaaggcgatcaggaagtcttcggacaaggtcttttcggagcaacaaaggcgctcgcaggtggaacgcaggacccggttcatgcacagctcgatggcgcaatcggaaacggagcgccgagatattcgagaaggactcgtcaagttcctcctgacactctctcggtgcaagatgaagatggaggcagttaccccgctatcctcatcaaaagggccttcagggcatcctttagcagagatcatagcgttcgggtcgaccatcgaactcgtcgagatcctcaagccggaaccaaatgctcgatctacgctacgcccgactgacgggcacaggacaacatcagtccgaccggagacctcggctgatcaggagacggttcaggtccttctaatggtacttcgggcggccatccccgacttaccctgttgcacatccgccaatcttatcgccggacagacgcggtcgagtcgtctcctcgaggcgatcttgaaacgcgggccggaagaaacctcggccgagcgccaaagcgcggcggcatgccctcctgcagacctcttgttgggcatgacgatccgatctcagctggtacaactcttatccccgatcgttcagcccatcacgagcgctctttacgattgcttctcacctcacaagtcgccaccacaagagatgtccgtcttgctgaatgaccgtgcgtgcagggacgcactgatgcaggtcgcagaagagttgatgttggcagagggacaagagcaaggagggatcggagactgggtgaccgaccaaatcacggcgttaggggacatcagactggacgagactacggaagagttgcaagaccagggaaacgccaacaggatgaacgatttcgtcgctctgaaccaagcccagagcggcctggcaggaagtcaagcgggagcgaacttgcgagtcgaccctcctgccccaccccaactcttagcttgcaccttcccttcaaacgagaccgataacagcgccgtgctgaaagtgtcggtcgagaaaagctttatgaaccctcatcggctcgacgggtcgagcgtcttcagaaaccctaccgacatccctctgggatcaactcaatatacccccgacaagccatctgacttgcccttggtagaactatcatctgcgattgacctacctcgtgtcttgtcactgtctaatccggcacccatcagtaatccaccagcgaaggactctttcaggactagcgagtttccctccagccaagatgcgtcgaacagccatttgcccaatggggtggaatttcaatccggcttgccacggcttccagagtcgaccggcctatctgtcacgccgaacgagcaaccccacagcaatgggccgctatctgaacgtcaggccatatcccagccttcgactttcaacaaaggtcccgctgaaaacatgcagatcccgactcgtgctgcatcacaatagcaaaacatgacttctcgattcgcgctctcacgtcgccctttgactagtatcggtaatttttcattatgtctcctgtgggagtatcttacaagcggtagtatcagtacaagcaaggcttcgtgattgttcatggccgtgtggcgtgcatctatttgttcattcccgccttcagctcgatcttgctcaagaggttcttcaggttcctgcctcctcttgtgcagttctcctcgagccaacattggaactcgccacggatggccgcgagttcgtcatgcacaggtagattgcccgaacgcgttgagagttttgggttcaagagcaggtcgaataaagattgccacagatcgatttgccagtactgaagagtggaacgccttcagtttcagatgaaagcttaacgcagtcgaacatatcaactcactcgcttgaaagacccattgatcttgtacctcttcctgtctccgtcattggctccagcaggtgccaaatccgtcgaaatgtacttgccgaaaagcatacagtaacatatgcttgcgagcccatagtagtcggcttcgtaactccacggctttccatctcgcatctcttgacagtctttggcatccacaggccaatcagccacaaaggtctgggcaatgccctgaggatacgctctcaggtcgattgtgcgacccagatcgataagatggatacccttgcctgaccagccgctctcgccgttcatctcgtattgactgatccactcgtccgtctcttccaatctgatgagacagttgtcaatcttgagatctccgtggataaagtcggcgcgatgaagcgcttcgacgatcctcaagagctcaatggtgaagaagatggcgagcgtttcgtccatgccaccagcggcgccggcagcgggtgcagcgataccccaggccgccgctttgttgaccgcgtcgagaagagtgccctggttataatagtcgaggagcaggatcgactcgtcctggtaacagtaaagacctctcgatttgacgatcgagggatggtgctccgatgccagtcttgtgcggatccgatcgaggacaacggcttcccacacattggccggccgctcgaccttgagagcgagcgtatacaaggcctcggggttcatgttctcatcctcgtcgtcgctggcatcgtctgctgcctcacgagcggcgagatcgatggccttgaagaccgcaccgaatcctccctcaccgatcttgtcctcgatttcgaacttgcggccgttgatggctagctcccatgcgcctgacgctgatggcttgctgccggtcgaggtcgaagctcgcctgccgcgcgacttggcagctttctgcagctcttcaagctgaccgcttgtcgtttgccgaagatcgacaaaatcgggcaagctggtgataggaggttgaagcgcagcgatcagaggttgcatgacatcgggatcagtaggacagcaaggatttgtcggattgaacatgacgaccgcctcggaagtcggcgatgggatatcttgcacgggtaccatgagcttttctggtcgagcgtcactggcatccggttccatgatggcgtcttcaggcgacgccgacgcttcggaatcgactaccgcatccccatcgacgtggacttcctgtcccgagacctcgatgggacactcctttggtgcatcactcgccacttcctccacaaggacgtgttctgtcggaactcgagggtgtatagtgtgcccgggggagagctggaatagcgagtgcgatacatccgaccgcttagagccttgttccccagtggcatcgtcgaacggtgcttgcggactgtcctctcgacggacggaatgttgtcgatctgatattctcgtgctctcgctttcttcctggacgaccgagagaccctgacgttcggcaatgatctcttcattctccacttcctgctcgaattcgtcatcctcgtccatagccttgcgctggctctgcgttaaagcgctcgacgtagaagatcgcaaggtaaaggcctgggtggattgcgtgtactcgcaagtgcgttcggtgatgggcgtcatcatatcgaaagcgccgccacatcgaacaatccgcctagggttatagtcgttctcgtcctgaagatactcttgattctggtccatatcttccacacgcgtgtcttcttccgacgtctcggtcaacgtggtgatcggtttcgtttgcccaaaaactcgctttgctggcacgggcgtcgtgtaacgctgatccgcaaagacagatgcggctcgttccggtgattccgcatcgctcacgacgggcaagggcatggcagttcgaggtgcgagcggggtcttcatcggcgtttggctaaagacggactcgcgaggagtcggctcggtagcctttgatggcttggcgttctcgtccgggaagacggctcgaggagcgttttcatccgcaaagaccggcttgggagcgttctcgtcctcgaacactgcgagtttggaaggcgcgatgacggcgttctcatcctggaagacggacggttccgcattctcgtcggcaaatactgcaggtttagcgttctcgtcgctaaagatggcgaaggcgggtttcttgagcaccggtaattcctcgtcctcctcttcaaagatggctccaacggctccagtctgttttctgcccgaaaggtacccctgtgcgggggtcggcgtggcgggaaccatccggctgggggtgggcatgctcatcccgacgcgaggcgcggtcccaggcatgggaagcggagtcggaggcaccgcgctcgtcttcatatcctcgtcgtcttcctcgtcatcatcgctctccgaatcgtccgaatcttcgtcctcgtcatcttcgtcaatgtccccgttcccacgtcgaccgacggtgagggtctggttgaacagctcaaagacttcggccatggcggccttggtgttgacagtaggggagggtggtttgcgttcgaccggtttgggcttctcgggcgattgaactaccgcagcacgtcgtccggtattagtatttggcccccgtttcagaatcctgtgtgcgcgaatcactcacgactaggggtatgccattcgaattcccaatccctgacctccttggctccccaaccactcgagctcccacttcccaaacccatcctcgctgccctgatctcttcaaagcaaaactcggtcccgttccggaagacctcgtcccattgaaacatcctccgctcgatcctacctcccttgcctacgacctcttgaccctcgtcgcccgtgctcgcggcgagcttggcacgcgaggctgaagacgagctggattttgatttgctcgatttcttctcggtcgtcgagctcgagtttgaggattttttggcgtccttgccgaaatgtttcaagggatcggaccggatggaatccgctacgaaagttggaggtaggggtttcgcaaacgaagcgtcgtcctataaacgggacatcgccttggggggttcaatacggtcgatctctgcagctgaatctagctagtcggacgctcgactcacggtatcgctgaaaacgctcatcttgggcgcccgaggggtcatcttgctcttgtcctgcttcatcacctctcccttccaaggcattgcctcgaggaaattctcctttctgttgccctctctcgtgcccatatcctgccactctccttcccgctgatcgaggcccgctcgggcttggtcggaaaatacgtccagcttggccccgttcagaggttgaccgaggagggtcttgggtacgctactcgaagagggttgtgattgagaccccgatcgagtggccagtgcgacccttgccacctggacgggtctctcggccgtctgctgtgatgtctgttcctcttcgatccccgcagcccggttcttgtgggactggtaattcgtctgcaacctcttcaacggttgagctttcctgttgatccccaacctgaagatctcgtccgcgctggtgatcttgcccttgctctcagccgccagagcccactcttcgtagaacaatgcatgacccgtgccgacttcccgactgttcaggaaggaccagacgtcatcgcttcgttcgaccagacgagcgtactgcgcccagagtttgaggtaacgcaggtcttgctggaaccgagcgtcgtcgatgaatttccgggtggtgttctccagtacgggcaagaggtgggagggggatgaagggtgatgttgagtgatgaaagcgacgtagctacgtcgtccaccgtatagtatattcagctatcagatgacctgtcatgatgtgtgtacgaatggactcacctgcaatacggctccaacacgtcattgacgccatggggcagctcatccccttcagcttccctccgattcgtctcttcgatcattttcttgtgccgttcatgaccctcgtgtaccatcctatccgcttcagctctctccttgttcaacacgttggacaagatggccgctgacctgcccgtagacaagggtacgatgttctccttttgagcctcgatgagcgcgaaatcggtcgtcggtgtggcagggacgtctcttgagcctgcggcgagtgagtgacctcccggtgtggctgggggcgcgagggtggccatggtcgaatcgagatcccccagaggtttccttaggaatcgagaggagcttgttcctcgtcgttgcctgagtggctggtccgggtctcttgaagggtagtgtagtagtagctagacctcgtagatacactctgtaataggacaattgggggttgtttgttatgatttcgactagcgaccaggtcaaggtcggcgatttgtttgtttgtttacactttgggaacttgaccaacgaggatgacatgatcacgtgatccacacaggttcatatcatcattcattatataggtagagtacagtacagtacacacgccatgatctcgcaagaatataagatcagagatcaaagaggaacgctcgtgaaatggtatcatgtcatacaaaacctcggatccatgcttcatgtatcgctcgtccccaatcacgcctttttgccagccttcatcgcggcgattttctacgagaaaaaaggtgtgggacgaaacacggtgtcaacaacatcccacccctgatccacgcttgaaatgacactcacggctttccgctcttccctccgtcgagccatctccttttccttgtcctccttgctcatcgaagccaggttgaccggcggagtagccggtttctcgggtatactcaccgcgggggattgcgctcgagcgggttccgacggcgtgatcgtctctgctatactggtaacgacggcagccggaacgttcttgatggtggagccggtcggttttggtgtcggtttcggctttggttgggcaacaggtctcgtcaccttgacctctggaacgggtgtttcgtgtactggctccatatcgccccatccgtctgcgtcttctatttgggctgtgatggaaaaaaaggcagagcggggaattcagcgcaacgcaacgcagacgtcggtcgatgtgattggcaatgcttacgtgatgcgacggttgacgtacgtaacaagctggccgtcgtcgtcgtcgttgttttgcgagaaccgttgacactcgtcgccgtcgttggccgtgtcacctccatcggcgtcggagcggcctcgaaagcgcctttgacgagtttgtcagggtataagcaatagtcaccacagctcgatctcccgacagactcactccagtcgtcagtatcggcattgacgtccatcagatccccatctccccaagcgtcccccaccgaatcctcctcgtcctcgtactcggcagctagcgtgtccgccaaggacgacgtctccttttgttgcctctgattgatcttggcagaaccacccagctgcattcgaccgcctcccgatggggacgcgccgaacctcgcacccatcgtcgagggtctagagccagacgatacgttttgttgcctgaccgatccgtccccaaagctcggcctgggtgagatggccggcgagggaacgttcgacccgttgaaaatctcggaagtctgtctcgggacttcgagcggtctctgcacctgagctggcgtggccgacatttgactgtgcgcctcgctcgaggggagttgcttgttcagggaagaaatggcccatcctgcgagcgctccggcggcacccgcagcggtcccgacgagactgttcccacccgcctgagcggcactcgcttgggtcgtcgtcgaaggaccattggccgcgctctcgctcatcgccgtctcgggctgcaaaacgtgcgaggtaagcgcgatcagcgcggatgccgagcgttcttagaaatgacactctgctcaccatcgccgctgcggctgcttccaacttgcccataaacacctgcatcgccttgaacgcctggtccctcactagcctgaaaagaaagaaagaaaaagcaccagacgcaggaaggcttgctcagcgatttcccactcgacgttcaacccccgacgtcggccgactgacttttccttgtcgatcatggtaaacgccatgttcgggatgaccctccccgcgatatcgtccttgtcgtagaactctacggtggccatcagcgccatcaaccctgccacccgggcatgaacgaacgtgtccttcaagctccgagcaaaggcggggacgaggacttttttcttcgtattcggaccgaggaggggagcgagccttcctagcaagatgcacgtgtttgtccggatcgacggttccgggtcgacttgcatcttggcgagcaggcgcaagaggtcgttgttcaataacctatcattgagctgaatgacgaaagtcgacgcaaactgtgatcaggcaacggcacgctcgaatgtctgcgtgggagacatgagacccaccttgggcgcgatgatggggatagccttgacggtagcctccctgatgacggccacggtatccgcgaacccggtgatcagatgcggccagactttatccgaagcgacgttcttctcgagcttgtcaccatactctgtcagcccttcgaggagggccatcctcgtccccctatctgggctcgcgtacagcctgacgactgggtcgagcacggtcgctgtgtacctatgcgggggaacgttcttgcctatactgagcacgaggggtaggatgtgggaagccggcgccgaggggagggagagcgagtggagcaacgagggtaggatctttgagatcaaaaagggtggggggagggtatccacgctctcccttatccgtctcaacaggctgatcttgtcggcctctcctgcgagttcgaacccttcgagtgaatcgacgagttcgatcaggttgttcccctgccaataccccgtcgcggcgacctcgtccacgaaacgcgtcgtgggcaacctcgtccgcgcgttggggttgagcatgcgtttgtacagagggaagagggatttcggcatggatccgatagaggaaggttgtggtgccgcagacaggttggggagcgggctatctgggttgtagagggcaaagatgaagagcgccaataggtacgtgtctgagagcgccggatcttggctggaaacggatgacgactcgtttgacgtcagctttacccccaccgaacccgcaatttcggacccgtgattcgactttcccccgcactcactctctcaaggcggcccatccgctcttcctgacctctggcgcgctgacctctcctacttccttgccgacgagcccaccggcaccccacaagaccccctgttgatcgtccatccctgtcaagacctcgaacccgcccaacctccattccagcgccggggtgatccataccgacccgttctccgggtggagcaacgcgtgatgttggttcagtggagcggcgttgacgaacgccagccccgtggatagggatttcaaaccccaggccaaccattcgagtcgggcttgatggcggtgggatgagtgtgggatgatactcgaggtggaccagtcggcgagggtggaagagaggggacggacgcgttcggtcgcaatgtagacgtgcgtctcggtctcgagcgagtcgatgtagcgtaacctgcagtcgtgtaagggtatatagcgtatgagcgtgatgtgccctctcatctctctccgtcctcctccggtcttggcgaggacggtgtgacggcgagcgggactcacacgttgggatgccggatcgaacgcaactttctgagcgcgttcttggcaatgttgaacaaggccttgcggtccctattgccaggttgtaaaggcggcaacgtcgaatcaaagatgaacagcgtcaacggcgtcgagtcgtcctgtcaacaacgagtcgagacaataacactggttgtgttagtatgggtggttacggtaggtctcgggggagactcgcctttttcactccgtcccgaatgtcccatatcgtcctcccctcggtccccggtattcgatcgccgatggtgaatgggaacgagactccggtggattgcaacgccgccgaggcgatgtttcgcaaaaagtccatctggtaggaagggggaggcgggaggtctgaatccctgtgtgtggatgggtgagtgattgcttaggtctgtattggatgtggttggatgttggccaattcatcatcaccacctcatggcctcatgagatgatatgcatatgaagctgaagctggctcggggtcctcgacatgaatcccccgcgacgtcgatcgatgacggcatcaacgcgctaggaacggacattcatgtgttttcttcgatgttcgtaagatgtccgctctcgctcagcagtgaaacgcggacatcgatgtgttttcgatcaatgacgtgtggatgtccgcttccctttcttccatttgattccgccccgaaatcgttcgacttttaggatccggtcaccttcccgagctaactaggagaatggtctcgaggagcgagcaagtcaggaaaacgttcaaaccactatcgataacatcttgatcaccgttcctcccacatctctctctccccctcccatcttcaggtaatcctgggtgatgaaaggttctcgattcatctgaaaacgtagacagacgaccacaacgccggctctgctatacattctcttttaagccgtatgtcctgcaccgtcacatcgacgtccatcgcataattaatcagtcgacccccctgcatagacatttcacgaccaccccttatacccctcaccacaatgctcctccttcctggagcgtcttccctctcaaaggtcaaacggaccgtcctcacccggtccttccaaaccgccgtcccctcgatcacctcggtcgacagcgtctacttgcacctcgtccaacccacctctgaggaatccctcggccagctctcggacgagtccagcggacctcgagccatcctccagagcttgctcacgtacggcgatgatgatcgactcgattcgaccaaatcgtacttgagcgccgacggtgacaagcgagatcgacaacacgagggcgagcacgttctgcccatctatgtcctccctcgacctgggaccatctcaccttggtcgtccaaagccacggatatcgctcggatatgtcgactcggggaccacgtcaagcgtatcgaacgcggttctctctacctcgtccgatccagcacgtccatcactttgcaaaacgtccaacaggtcctgcccgacattcacgatcgaatgacccagaccgtcatgaccgataccccggcggcgttcattgtcttcccgcccgtcccgcctagaccctcgcccttggtcaccatcccgatcttgacggccgaggacccgactcagttgctcaaggacgccaacgtcaagctcgggttggccctctccgaggaagagatcccttacctcatctcgtcctttctcgccgccaagaggaacccgaccgatgtcgaactcttcatgtttgcccaggtcaattcggaacactgtcgacacaagatcttcaacgccgattggacgatcgacggagagactcaaccgatgagtctgtttgggatgatcaggaacacggaaaaggcctgcgactccaagggtaccatctcggcctatcaggacaacgccgccgtcctcgaggggtacaccgcgccgaggttcatgccgagggaagatggcacgtacgaagccaacctcgaacccatgcccatcttgatcaaggtcgagacgcacaatcacccgaccgccgtctcgccctacccgggtgcggcaacgggttccggtggagagatcagggacgaaggtgcggtgggtaggggaagtaaacccaaggccggtctcgccggtttcaccgtgtccgatctcaacatcccggggttcgtccaaccgtgggagaccgatgtggggaaacccgaacatatcgcctcggccctggatatcatgatcgaggctcccctcggtggagcggcgttcaacgacgagttcggtcgacccgccctcggaggttactggaggacctttttgcaagaggtccaaggtgcccaatcagggacgacggaatggaggggttatcacaagcccatcatgatcgccggagggttgggcaacgtccgaccggaattcgcgctcaaggacaagatcctcgagggggccaagatcatcgtcctcggtggaccgggcatgttgatcggtctcggtggcggggcggcgagttccatggcctcgggtgccagttcggcggatttggatttcgcatccgttcaacgggaaaacccggagatggagagacgggctcagcaggtcattgatgcgtgtgtcgggttgggacccaagaacccgatccagagcattcacgatgtcggcgcggggggactgtccaacgcgctccccgagctcgtacacgattccgacctcggcgccgtgttcgagatcagggacgtgctcgtcgacgatccttcaatgtcccccatggagatctggtgcaacgagagtcaggaacgatacgtcctcgccgtcggaccgggacacgacctcgagacgttcgagaggctcgccaagcgggagaggtgcccttatagtatcgtcgggaccgcgacgaccgaggagaggttggtcgtcacagacaagctgttgggcgaacggcccatcgatatcgccatgtcgaccttgtttgggaaaccgcccaagatgaagcgagaggcccagtcgatcagtccccagaggactccgttcgattcctccctgatgacctacttgcccgcctacgaaaaggcacccgtcacgagcttgatggccgaggccatcaacagggtcatgaggttgcccagcgtcgggtccaagtcgttcttgatcaccatcggggataggactatcagcggattggttactcgggatcagatggtcgggccctggcagatccctgtggccgacgtcgccgtgactcggtcgagctacgggttcgacgtcgtcgtcggggaagccatggccatgggagaacgtactccgttggccctgctcgacgccggagcttccgctcgtatggccgtcgccgagtcgctcaccaacttggccgccgcctcgatcgaaagcttgagcaaggtcaagttgagcgccaactggatgtcggccgccagtcacgagggggagggcgcaaagttgtacgaagccgtcaaggccatcggagtggatctctgcccggctctcggcgtcggaatccccgtcggcaaagactcgatgtccatgtcgatgaagtggcaggacggcgccgacaagaaacaggtcaccgctcccctgtccctgatcatcaccgcatttgcacccgtcgacaatgtcgaaaagacctggacgcccgaactcaggaccgacgtcgagggacccacctcgctcgtctttgtcgacctcgctcgtggcaagcagaggctcggtggatccgccatcgctcaggtgttcaagcagctcggtcacgaggcacccgacgtcgtcgaggccggtgacatcaaggcattctttggcgccgtccagttgttgaaaaaggatcatccggacaccgtactggcgtaccacgatcgatccgacggtggtctctttaccacgatcgccgagatggcgtttgccggtcgatgtggagtggaaatctcggtcgactcgatccagccttccgaggacgccatcgccgccctgttcaacgaggagctcggtgccgtcatgcaggtccgtcaatccgacatgcacgccttgaccgacgcgtttgtcaaggctgggttccctacgagccacttgcacgtcgtcggacgggtcaccggccgagacgcccagtcggtcagcatcgttcacaataacgacacgatctacacgagcacccgaggtactctgcaacagctttgggccgagacttcttaccgtatgcaggccatccgtgacgaccccatcgctgccaaggaagagtttgaccgcatcttggacgacgccgacaccggtctcatctgtgacttcaagaccgattttctcgccgacgtggccaagtctggttcctcggcgcccaaggtcgccatcctgcgtgaacagggtgtcaacggacagatcgagatggcttggtcgttctctcaggccgggttcgaggctgtcgatgtgcacatgtccgacatcatttcgggcaaggtttcgctgagcggattcaagggattggccgcgtgcggtggattctcgtacggagacgtcctcggcgccggtaacgggtgggccaagtcgatcttgctcaacgagcgggcgcgcaacgaattcgagacctttttcaagcgagaagacgcgttcaccttgggcgtgtgcaacgggtgtcaattcctgagtcagttgcaagagatcatccctggtgccgaatcgtggccgttgttcaaggtcaaccggagtggaaggttcgaaggccgggtcgcctcggtcaaggtcaccgaatccgccgccaactgcatcttcctcaagggcatggaaggatcgacgctccccgtcgccgtcgctcatggagagggacgggtgtcgtacacggacgcctcgcggtcgtctcgattgatctcggatggtctcgttgtcgggcagtacgtcgactatgacgggaccccggccacgacctacccggcgaaccccaacggcagccccgaggggatcacggcgatcacgacgaccaacggacgggtcctggccatcatgccccaccctgaacgtacggtcgcgagggagagcatgagttggttccctctcgagcagggtaaaaaatgggacggcaaggcgccttggttcaggttgttccagaacgcgtacgcctttgctaccaaggcgtagatgttgcccgaggagatggtatagaaagaattttgttagaatgagaaaggaaaaaaaaacaatcagaacgtgttcttttgagcagttgaatccggttcgtggggttgccagtgtttctagtctttgtattttccgatatcgttagcatgcatcatttcgagtgaattctgtctctccaggtcatctgcgaacgaagctctgtatgaaagtgatgacgagaacgattgatgttgcccgatgacgactactgggaacgagtggactacaacccgagcctaccgcccatcccacccggaggggggggggggtctagtgattacctaagcgatgcagcggatgccggcactcgagcaagttgcctgccggcagcaatcacggctgcgaatggattgatggccccgttgaattcgtcatgacagtagagggtcttgcccacgcaccagtcttcgtctcgatacctttgagattgacattcacaccttgcgccgcgagattgggtaggcggaccatgacctgtctggattccatttcaagtgccacgccagctaccaccagctcccacctcacctcgttgaaacgtcttgaacgtcgattgaatagatcctcgcgtggcttctcgtcactcgctctcgttcccctctctctggccttgacccttgatcgactcgtttgcgcgtcgcccttgtgctcgtgtcgtcaccctcgacctcgtcggttcgctgcgtcctctgccacagcccagcccatcccatggatctctgcctgcgacaacctagctagctgcctctcgcccatcatcaacgtcgagctcgacgatcactcgtgttctagaccaaagtcgtacacagacactcgagaggaaaaacgacttgccgtggacgaacttgcctttctcacttccgtctttacgcctcccccatcacgcctacattccccctaccgggcgtcacactcgatcggactcgcatcgcataccggggtcacggaatttcgactttcgagatcgtttcgacgtggacgtctatagctacagctacatacctaccagcatcgatcacgaccccactctccccctcgagttcgagcgatcaagcgggcgctcacgagactgtcaaaggacctcgaatcgagcgacgcaccccctggatctagagaagatcgccgagccgagccgtctcaaaggacccttttgctgctgctgctgctgctgctgctgctgctgctgctcttcctcctcctcccgtgtcctttggaagatcaacgctcctcgtgacgagatcccccattcgaagggtcattgatctcacctcgctcctcccagagattcatcggcgtcgaggtcacctttttccggagcgaaatctgatcagaccgagaacggcacgacgaccattttgattattaccacgacgacgacgaccgactgcacgacatctcatcacctcgagaatccaactcgcaactcgtctctcactctgaattcgacgatcactcgtccatcgggatatacgcatagtccgaccggagctctgatcaggaggaccgattcgacgtcatataatcaaaagaggtcaaggtcgacaagcagctaacagagagcggtagatcagaaaggcgtctctccaccgtcacactgaagtaggtaaagaatccgtctgtctgcagcgaagaggttggaccgggagccactgcgagatccagctagctgatcagcaaaatccctatgttttctttcccgtcaacaggacagaacgacatcttgcctggcttttgggttgtcatagtcgtcgaacacctcgatagtgttccctgttcgtcagcatgtcagaccatcatcaattccacctccagcaacaacacgatcagatgcatcaacagccgtacgaccagatacaccagcagatgcaacatcaacctttcccgctcaaccccatgttccccgcatctcatcaccccatgcccacatcttcatcgacgggcgagacgccgagaaaggcctatagacccccagcgttgaggacgcagggccatttgccgacgaggtcactcgaagagctcagcgatgccagtggtgacgagggagacgttgggagtgggctcgggagtgggtttagcgcaggatatagaagagccagagccgggttagtcatcgcgattgtatatagcggaggggcgttcgtcggtcgctgatgtcgttgcgtttcttttctgtcggccccgcatagaaccctgccatccacactagacgccccgttcgcgggcgatcgttatgggttgagtaacgccgtcaccccgaccgcgcctactcatcaacgagatctctctctcgggcatcccgaactcatcacacgttccggagggacgacgccgatcgaaccgttggaaagacaacgtcaatttccctacgctcgacccgggttgagacattccaattcgtcagcggcggctctgaccggttcgggatcgttgagtctgggtggacagcaagaatcccttcaaggtgctccggggcttttggacgatggtttcccctcggacgctcaaggtaggttgagaagcggaagcttgacccgaccggacaaggcggtcggcaccgtctcggacgcgttcggatcgggtttcagcaacacgtggttgcagaaccctgccggaaggagctcgatgaaccaggtcacgaccgctcgacctggcgctttgggccgaggagcacctttgcaccaagtcacttcccgcgagagcagtttcagctctggcaattcgagcggcgggggagaggacaattacgccatatcccagtcgaccgtcgactatctcggtctcgccgacaacatggagactccccgagcggcgacctttgggtttcagtccggtcccgcccctcccgtccccaataacccgtctatggcccgaggtccgggtgccggatccgcacaggacttgcaaatgaccccgacggcagcgaccatggtggccaggaaccgggcgagcaccgtctctgtccagccgaaatcgagcgcttcattccaggacctcatctctgccgctaatttgggcctggatagagacccgactcgacctgtcggattgttcgactcggcacagagaaactccgcagccaatttgcgagctggtatcgaagggatggaatacctcgaaaacggtggaataaacaatggcaatcgcgatccctacggcccatcggcatctcactttggtatgcccggaagcggacaacaattgcgtgggtacaaggacgatgggctgtctggcatggcgagaccccgagcgacgacgattagcatgctcgaccagccatcggccaggttgggcaacgtcggtatgcacggctcagaactgatggacagtctcatcgcgccctctgcaccgacgcctcccccgatgggcatgtcttcgggcctcatctctgccaatcaaggaggcaggcgaagcgctctgggtaacgaagatggcggcgccggttcgcgcaggcgagaacgaggcggggatggtgctaggtccgggcccggaggggcttcgggagacgggatggcggcgggacagacgcctaccaggagcatctggcttggtaatctggacgtcatgaccacggctcaggatctcttgcaggtgtttcaaggttatggagatatcgagagcttgagactgctgccagaaaaggtaggtcctcggccggctttgatgtcgagacatcgtttatcgctaacgtggtgctactgctacagtcctgcgcatttgtcaactttatcgatcgcaacgatgctattcgtgccaaggaagacgttcaacttcgtatgcacaacctcatccccacgttgtccgacactcctatcaggatcggattcggaaagatcgactcggttcctaccgcccaaccctctgcttcgactcagcagtactcgctcagcaactctagcgcctccagcatggccagtcagagcgatgttgaatccgatgccgagtcggacgctggggatgctttggactcggtcagactcgatgagatcagctcgcccacccgggccctctgggttggcagcattccgtcccatatcacgtcgaccacgcttgcgaacatcttttcggcattcggatccattgaaagcgttaggaccttgacgtcgaagcaatgcggatttggtacgtctgagggaatccagcctcgctatgcgtgcgaggctacaagctagctgacattcatatcatctcccgcttgatagtcaatttcgaaagcttggaatccgcttcatctgctcgagatgcgctcaacggccgcgagttccttggccgtgatattggtcccatccgagtagggtatgcccgagcgccggcatccgatcagcgtgggaatgaagggtctccctcgacgaacaatttcgcatcgagcttctcaggacaaaaggccgatgagacctccactggtaggcccgctggcaccgcccccatgacgcaagaaaacgtgtcccacatcgagagttacggtaacgatctggtcagggatctcataaacaagggctcccctcgaccgagcggaggtccagttcagccttctccgtcttcacctcaacaccctgaagctgatgtcgccgcagagggcgatgtcaacgaacaacaaatgttgatgaccgtgttgagccatggtgatgcgaacctagctgcagacgttcaagcagttggcagtgagtagtgtcccaggtcgtctgcccgaccaagctattgatactgttccttgtagagcattccgagaaatcggcgctgtactacagctatattcctgtagtcccggatcgctcacactaccgtaaatttgatacggtcgccctcaaggacatccgacgaaggctcgatggaggctattgcgcacccgaggaggtggaccagatcgcccaagacctcatggatgattgcgtggtagtacgtgcctgtcgccgaggagaaagattggttgagaaacgaattgacgatatatcttgctctttgtcagttatcatctgactatattggcaacaccatcattcagaagttgtatgccagtaccactacctccattcgcatggagatgttgcggcgcatcgcccctcatctcgctctcacaggaactcacaagaacgggacttgggctgctcaaaagatcatcgagtgcgctcaatcagaagaagagatgctcataatctcccgaaacctgtctccctacgttccgcctctgagcgcggacagctacggaaactacctggtgtccgcttggtaagtgcctacccatcgatggccttggataactcagccagctaacgagtcgcgatgaaccctcagcctcaagttcccgtcgcctttcaacggtttcgtgtatgatgccatggtcgacaggacatgggatatcgctcagacccggttcggtgcgcgttgcatgcggacttgtcttgagagctctcacacgtcgttcttccaaaaggtgtgtcacaagcatttgtgaacgaccctgactgcgttgagctgaacacttccatgcttttctcagaaacgacttgccagcgccatcattctgcattcgattcccctcgccaccaaccctaatggagcacttttactcacatggttgatggacgccaacgagttgccaggtcgctacggcctgttagctacgcgcctggccagctttgttcagcacttggccacgcacaagctggcttccttgacgattttgcgacgtgagacactgcctcgcacggctcttttgattgatgctcagctgaccgcatccgttttgtctcagtcgtaaaccagaagaatgaacccgaggcggccaagactatgcttgacgccattttccgctctgccaatgaccagaccttgcgcgagatcttacaggatcaggtacatggcgtccatgccatctccaaaatcgtttgttccgacgccatcatccgtccggacgaaaggcccgagatcttggctgccgtcaagcgagtgcttgaagatatgagaagcgtttcgggactcaactacaagcgacttttagaggagtgtggccttcctgtacccgcagctccttcagggggcaaccggtaccaaggaggcggccggagagagggaggccatcgacaccgagagcagaaccataatgggggttacaatcccaacaatggtcccggctacagaggccgtggctataaccagaacagtaacaacgctggtaattctgctcagcagatgggcgggttcgactcgtatggaatgatgcctgacatcaaccagatgatgagctcgatgcaggctttccagctgggccaaggcatgacgggaagtttgagccctcttctggccaatcagcatagctttggccaggttatgaacccaagcttgccacccttgtcgccgacgcctactcttgggtctttcgccacgcctcatgctcagctcatgagccccaactcggacccctttaatccggtaagcgcgggttgcagcgttaataacgataatgacgtcgctgagtctcgttatccatctacacagtttgcctcaccgtcccaactgccccgcaacccaaatggtcctgttcgatacccgactcctatccgtcgtagtccggcgcctttcgacctctcgccgactctgggaggcctcggcatgcagccagccagcagggaagacatgcaccgtagcagtttccccggtttcgcgccgacctagaagtgagttgttgcgaagttccccgcctacggtcaacacgctgaagcgacttggaagcaagctccgagcgctcatcaaaacgatgttgggcatcgacacgataatccttttctcatgaagttgccaatatccgactattacggactactcttcttgacgacaacgattgtataggagaggatcgactacgatgcacttggcaccccataccgactgcgatattccacgacggctcggaacgaaatcatatacccaatatctcctgatctcgtcttgcgactcccgattctttttcaccttaattagttgcatatctgtacgaccataaaaagtgtcccgagtgacgcacatcacgattttatgccattgcattgacggaaatgcacgtcctaacaggaatcataagggatccgtgtcacctcgatcagagcaatcttcttcatacatccttttcaacatgtgacaaaaagatacagtcgtctacaaaagtccttggctggtctttaggaccgcttctccaacgcgaccttgacgtctctcttggcatcgctaggcagcctctctagatcttcgatcattccagagaggtcgggcttgacggcataaccgtccgaccacgacttgtagaggtgagcgaggattccgcttcccattccgagccatccaccacccaacagtaggatgggaagcggggcccgcttgagcaagagagtgggggtaatcagagctccgagggtgaatccgatgagagaataatcatccgtacggatctgtgtaggctgtgatagaggtgaatcgttcagcatcgctcgctagaaaagaggccagagtgttcagacgagctcacattgtgcgactgtcgcggcaaaaggcaagccgtcagcgagctgatggtgacaggaataccttgggaaagtactgacaagtctttctctcttgctagccatggctacttctgattcatccttcatcatgtaggcgccgatcgggacgctgacggccgttcctccaatggccaagaggttcattcgccagaagaaggacctcaccgagaggggcttcttacggatgaggtgataggcgatgatcagagggggcgacactagggacatggtctgaccggctttaagagcggtatggaaaagcatgtagtccgtttcaggcttggccgagagttttgggtgagggatcgtcgacatgttgtgggagatctacagaagaaagcgtcagatccaggcgctttaacacacgatccattttcgagttaccggagactgactttgatcgaacgtagttgaggactgtggagagaatgaatgaattatgtgtctactttgactctttgccagactacgagatatggcgaagttattgaaggtagtcggccatgacctcatcggtttggcggtgcatgacgatatttacgatcagcgtcgatcgctcctgggcacttgttgcgtttgggatcgtgattacgtaatcaccagggttgtcctgaccctgaacctggccggccatcagcgtccaagtcccttcgctcaattagccaccagtcgatccatgaccttactgtacgttcggccgttcaaactggtcacacaaacttgcttgaagaaccactatggcagacgaacagagaggtgcgacttatctcgagatctaccgggggtccgcgtaagtccagccccgcccttcatccatttcctcggctgatgcttataccttgataccaataatgaacagccttggtcgatctctgtgtgatgctctggatgaaatggtccaccacggccagatgactcctcccttggctaacgagatcctactacaggtaggtgtggattcaggactcgcgagcttgcaaggaagtctcaaggcgagacgagcaagcgctaaacgtcccttttgggttgcatctcccagttcgaccgtagcatgactctggctcttcagaaatcggtcaaggccaagtcatcaatcaaggtgtgtcttcgatatgactacgaggactgaatgttttacttacctgaggatgtatacctaacctcctgtagggccacctgaagacctatcgctcggtcgacgaagtctggaacttcagtatccagcagccaatgctcaagctggaaagtctagtcacagctacagctggcgacaagaggtgagttcatttgaccgaatagcaaccatgttgcagcaagacgaccgaggctcaaccgacactcgcgtcgacagtggcgcggagaacttggttatcgatcaaatcgacattgtggcttgcaaagctcccaacacctgatgcacgtcatgaacaagcttgcccaaccccagaacatcccattccaatgtcgtttgcttgcgattgtgatcctggcacaaagctcgcagtctcccctctcatacgaatttctgtctgctacgacaaacacatttacgacaacatcgcgattacgtatcacatcttgcactttactcgttgtacaacttgaacaaatgaaataaactggttgactatccattctatggcatcgcggaagccagggcaagaataggcagttctgcagcgaagtccgttctgtttccacgatattgctgcatccgctcatcgcttcttcagagcatcgaatctggctgtgagcgcagcaaacggatcttccgccttgcctggcttgtacagggtcttccttgtctgttcaatcaactttgcctcggctgcagtcgattcgtttgctttctctttcggtgtattgtcgttctttgtaaatcaacgtggaatgatcaatatcgatccgttcctgaatcccataatgacaagctcacctcggcatcccctgctttggctgccgccttcgcttcgccttcggaggcttccgaggtcaaggatccctcttcttcaggctcatcctgttttaaacggtcagacgtccaattgatcccgtacccgcgagcgatctcctggagatacatgtctacgagctctggcggtggcacgtagatggccagcttggagagtactcttggtggcacgcatggtggatcgttgtttaccacagacaaggcgaacgtccggccgaacttctgcatcagcatttcccgtagcagatgcagctctatgaagacgattggagacctgcatgaaaacccagaaaacccatgtgcatacgtgctggtggctcgaaaattcgtacctttgagctcggtgtgaggtgccgcatagatgatcgcgcaaacagcatctctgaggctcgggtcaggggcatccttgctacgttgcgaaatgaacgtcagtcgctgtcagtgctgagagtcgctgtttggacgcttacgaggcgtctagcaaggcgaatctagcggaaagagtttccgtgtagagctgttgatgcgttaaagatcggccaagatgtacaggcagggttgacgcccatttctcagacatacctcaacgatctctaacagttcgacctgacagccacatccggcctatcagcaggagctgcgagcggactgtcacgctacaactcacgtgaatgtcatccccgatcaacgtttccactcgtaacctagctgtttcgattcgacccttggtcacgaggtctgctatctcccttcttgatctgttcgtgagattggagtccgataaatttagcgccaagttcatgggttgaagatgatagatggagcgcgctcactgcttcgctaaagccaacttcttgtcttgcaagatagtgagccgttgagctgccagcctgcgttgatagcgaatagttccttatcagtgctttggaacgtcactctcatttgtagtgcacgtacttaagctgcacctgtgatgattagaggtaacgagatgtttagcagagtgtgcaaagctgaacggtcacctgccagatcgcgcacccgagccttttgagcatgccatggaaccatgttgatgttcagagccgagaggaagttgatagagaccaaaaaattcagggcgtcccaagaggttgtgtcgcagacaaaagcctcccgtggattggctctccgaaacacagagtagccatgttattgacgagatccctgaacctagaggctagatcggcgactgctcgtcaccgtcatttcggagtcgcccgacatcgtttacggcatcgccttgcccaaaaaggtgttctaggatccgggcagctgcaccctgatatcgatacaacaaaaagaaacagctcaatgattcgcatctacaacggtattgcattcggtattgacagtcccttgtactcctatcttgcggccggtattagtctcttttgatgtggtaaaccgttaggatacggcgcttgccccgggcagtatcatatgaaaacggtcggagcattctctatcatccactcgatggagagagctttgccagcctgaagttttgcatatataggagattgtgtatacagtcagtaaggattttctgcgtccgagacggtatcactgaccatgtctgcaaattctcttgacgggtccgcggaccgcattaatgtggctgtcgaaagaagcgaccttagctaaatgaaggaacgacggcccgcttgcctgtactcacgtccaaagaccactccaagattacgtgcgttcatcaagttctccgcgctggaactcttgacgctgtatcacagatggatcagctggcagaatcgaaggcagacatcctaccgcagcccggtctgtgatcgttgactcaccgatgaagatgcaacataagggtgcgcagggtattgtagtgctcggtaggcaattgcgtcaaaagtgttgagagcgcttcgaacttcgcttccggttcccggatggcttaagttgaaaacggattttgttcagcctacagctgcgtgatcgggcatgatagaagtgcaactcacaagccgcgttgacaaacatctcgtgcaatccatacgtcaagagagggttcgggagcgcacggaaatacgatttgaggacggacgtgatcgagttgatgtcgttgaaacgatcgatatcgttcagatcgaaagagtcgtagttgcctttttcgaatagctgggttatggctttggagagggacgagccacctgtctttctgtagatgccttcgtactccatgcctatatcaaagggaacatgattcagcttgcaaggtcgcccgttctcatgtacgtgatacataccttgagtctcgaccgcttcaatacacttcgtcacgatagtcggcacggcttgcccgtcttcctgaacctgttccgtcagatctcgtccgaaaagggacggtccggccgctttcatggacagacaggaaggttagtcagttgcaactatgtcctatgaacaggaaggatggctcacccgtctctgttgagggctcttcccgtatgtgccccgagtgactgcctgagcacgatccaccgagcttgtcgacgcatttcgtgtggcaatataccccgcagactaattatcacaaagttgcgggctcagcacagtttcacatttgtattcacaggcctatgactgacctgcacatcgaacttcttgcagaccccacattttgtctccgcaatgctcgcatttggagaatctcagaatgcttgttggctggaagacgtgctcccgcagtccaggatcagtgctcggtcgagtcttgtttttgtcgctaggcaaggctaggggccgtgaaatcgaattggagagtccgctaggctcggggcccttcgaagacttgtaccacttgaatcgacgcccagccggggctgcgtctatcggatctgatcgaccgttccgcatctgcctgaagttctcatccggcagatcgtgaagtgcagcactcgttgcaatagaggacaacgatggcgaacccgagatatgatgtttgattccgggtcgcatatacgcggaaggggcccggggtcgattcagtccatcctgcatcgattctgtctgctttgtgagtcgcgtattaagctcggccaattcgtcgttcttggcggaaagagctgctgcttcttccaaatagaggtcccgagtgcctctgagttcagcgatttctcgactcagacgctcgtgttccagtgttaatggctgaagttgggtcttgtactgctctttgacagtgttcattcgcttagtcagggagcgcgcgaccgtagctcctttctcgacgggatcaacatttggcaggtccgagtctctgatagctcgccaagttgttagatatgagccttcctggcagcatgcttcgcggtttccggtcagtactcacgctttcgcggctgccaattcctgcacttccgccaaagtgatgtccctttcgacccgcagcttcgaaacatcctgctccaaaccgcttaggttggttaccagatcgttggactgtctcttgagactctcctgacgtcgttcatcttctgctatgagtgaaagtcgagcggtctggccgtggacttctgctttaagtctcgcgacttcggtctcagcttcaagacgcgcttgtacggccttttcgtattcctcagcagcaacggtcatgccctccatgtaatgaagactagttctctatagattgggattcgagagctcagtgaatgttcagtgatgacgataagcgcagacgcttacccgagccccagagtacttgtccttcaacacagtcacctgatctgtcaaggcctggatctcggcgaccactcgttctagcagtgtcttttgtacgaaaactgagccttccggtgtattcgcggtcgcatcgctctccagcaaggattctaggcttggcaaagtggtctcgagcgcgggaattttgagttcgctgaaatctgaaaccagatcctctgatgactgcttttggatgataagtgccggctgtctcttcggtgcagggtctgccgatcgagaagcaggcccatcggtattgttcagcgatctcagactatccgagcgttgaggtctttccgaaatcttgctagcatcggatgcgtaggcagccatgatcgtctgcaatggaggactatgagcgaggacaggggacgatggcagggaattcgatcctggcgtattcgtcgatttttgtaacggtgtcatacggtcaccggcagccgtttgaagccgggagcgaccgggagaagcctcccttgcggcacatgcttgctttgccttttctggcgaagctttgttttccgccaagagtttggcaaagtcgggatcgctgagagaaaaacctagatttgaccaagcgggagcgtctatgcgaggtggttcatacaaactgggcggatcaggcggtaagcttttgttcaccaacggattcgcgggttgtgcttgttggtagacggtcttttccttgatcgtgatattgtccgcgtcttcttgatcacgatcgctgcccttgccgttcgccacgacatccaatgactcggttagactgctcgagcgcggcggcgtttcagtcgtcagaccagaatccgaattagcgcgtacgataggacttcgtgctctagaacccccataggttggtgccgtcggtgtcagacggctattggatgctgggtaattcttcaaggtaggactgcccacgtgaggtgtcgtccgggaaccggcccgctcgttttcgcgtgcttcgccatcagtaaagctcgctcggagcggagaattcggcaatggtgagtgacggcccgccgagaagctgtccacgacgggagaaggggagcttcgaccagaaaagtagtctttgcccgaattcggcgccgagcccgaggcagattgcacttcttccttgtactgttgctgctggtagttaagtaccatttctgggttgatcgaccctcgcctatctgccctcgatgtcgagagggtatttaacccgccaatcagaccaacgcccaagccgataggcgcgtccgtgacggtcgggtaggtttcgccgccattccggtttctgtttctcgaattcggtcgttccccatcgaccgtcgaggcagtcccttggcccgaatcacctccagaataatagctcatatcgatctcgactcctggactacgtttccgtcgggaagtagacattggtgaaggggaatgtcggtgtcgctcgagtggagtcgcgtgtcgcgaccggtcgtcttgcacgttatcgttgtcagtcgctggggatccgagttggatcgtttcaccagctgaagatgcgccgctgggttccgaaagcccgacgaagccatgtcttgacggtgacggtgtcaatccagctggcgtggacaaagcgctgatcccgggaaggacatccgtgcgagggctcttccctgactgacttccacccgaagagtccgctcgcgacctctcgatcacgctcgccccactcataatcggagcaggcctttcgcccgtgcccctggttcggtccttgtccttgtccttgtccttgtcgcgctcctttttcgctcgagctcgttgtttggcctctgcatgtcgtcgtgatcgtgcgactcgttcgttatgacatgtctgcggtaagcgtcaaagacgatcgtatcagccaaacacgtcttgaggatcgccttgggcaagatggccgctcaccatgcaatagatgccctgactcgtcttggcaaagaccaattcttctatccgtctcgaacattgcctacaggtgaagcaatccgcatgatagctctcatcgcccgtcatgatggcttcctcggtgatgggcagcttgcacacgtaacattggtacgagcaggaagagcacaccgggtccccatccgacaggagcaagaggttcgtgtcggccgtcactcggttgttacatttgacgcaacggaaacagtcgacgtgccacaacgatttgctggtaaaggtgatttgtgattgcgcgccggtcagattaaaagcaggtggtatcgggacgccaaaagaaggaatgtgatgtcggtcagtttctagcgcatagagggaccaaggcctggaacttgggcagctcccagcatacatcccgagtaactcacccgaatgcgaccacgatcccgccactcgcctggtcgatcaacttggaacaaccgccgcattcgacctttttccctgcgaccatgtccatcctggcgagttcctgtctctgtgctgtctgggacatggtccgcctcacgctcgtctcccctttcggctctccgtcgtgcatgtgtgagtgcgaatgcgaatgatctgcattcgagctcgcgttttctgcgtggtttctcgaggtttcatgatgggatgtggaattggtggtctgggagtgaccgtcgtgtccgtcgtcggtgttgatctcgacaccctggtcgttcacttcgcgagggaaagccatgttgggcgacccaggtcagtcgacttgccgtcacgttggggttgaggagctgatgagggaggatagcttcttcaagctgtaggaggagacggctcacttcctgcggatagaggtggtgaagtttgtcggaaaggttggggaaagtgcgtccgattaggttgtggtgttgttgggtatgcagagatttcgagcgcgaggtgggcagtcgtgactgatgattagaggttgtatccatatgctccaaactagctggtcgtgataccatagaaggattttgaaatgctaatcatcaggaaggcaaggtcggcgctacctttgtcgatggcatatggcgacaccagaagtccaaagtccctagaattcggctcgaatgattgcgagcaagaaagatagatgcgtttagcccgagatccgtcggaacaaccctgttcgagcgaaaggccaggatcccgtgtctctgcagataaaagtgcaagcgtgtgccttatagctcaaatgaagattctatcagggcggtgtaatgggcagcatgcccgatgggaggttgaagaacgatgtgtcaaggtccaggtcaatctgatgagactcgtccgccggggagcgagttgcgtgctccgcgtcaacgcgagcgagcaagcagcaagcacctcggagtagcccagaaaacggtagagcagcagtactcgtagctatagatctacctcattccccaatccttagcagcagacgccaggatacagcgctacataagagcgataacgagtaaccccgcgggcaaatatcgctggacgcagaggaatttcaggcgtgtcaacgagagcaatcccccgggagcttaaacgtaaaatccctagggaccccccttctttacaaaggcaaaaatagttgtcaacgatcacaagatcttcacacagcagataggctggagaactttgttctgacacaagactcctggaagcacgagtctaacgtcggtgtcaatcggaggactgcgaacagcgatgtcatttcacgccgagctacgttccgcgctcgactcgaagctcgccgagttgactacatcccgacagtctctcctacgggcaacgagcgagtaccccgatgcggacgagatcgtacccgagatcaccaccttgaaggatctcaggatcagcttgagggaagcatggcaaggagcgtgcgaagcgtacagtgcttcgcatgacggtgaacaactggatgaggagctgataggaggatacgccgacggcgttgtcagagaattcattctggacatcgcagtaagtcctcgagtcttcgccgacgagaaaccaaaattttcgcttacagcccatggtccttcctcttgatcagtatgaagagccggcacctcaaagcagctcggaagaggtgtcgacgttttacgaaaatatgttcgactcgcttgacatcggccttgtactcttcgaagtcgcatacggtgagcctagccttcgacatctcatgcgctaagaattttcaggccgacgctgacctaggcgatggtgttgtccttcaacagaacagtaccagacgacgacttcgctggacgctggagcatcgctgagcctggttctagaggatctaggggacgtcctctcgatccaggggtggagcgtcgtctttggatggatcgaacgacgggcagaagagattaccctggtgagtgcttgttcgtttggtctcgtcgtgatggaggttgacacgtgatggaatcgcagggaatgcaaccgtcgaaagggaaatctttgacacttctcaaattgttcaatcaccttttgcaacaaacgtcgcatgtgatggtagatttcgggtcgagtaccgataccctgctcctgcgagcccggttacacttgttcatcaccgaatggttcaagttgaatgacatgagcggtgtcaaccttcgaggggaatactccgagatgagacaaaattggccgggactgaatggggaggacgatgacgaggacgaaggagatgaacagaccacaatcaccggagcgaccgaggagccagtgaagaccaatcctgatacaaaggacgagacgataatagaacaggaagaggtcgagggcggatccgcagacggcgccgaagcgcaagacgatcagcctgcaaagccgcaagacgccgagtctgataagcaagagatgaaagagtccgatcctgacaatgcagatcctgaacctgcggctgatcaacccaaaagtgaagctgtaacggagcgcatggaagtggatgagccggaaccatcgtcaaaagcccaggacgagccttctgaaccgcaaccggaagacttatatactgccatgtaccacctccaaatgattttcgcaaatccacccttgctcgtcggttcgcgaccagcagcggggaccagcacatccaactctttgggagagacccccatgcaggctttcagacgaaggacggatatcgtcctgaaggagatgagcagcaggaggggagaggcgattgagatggccaagagcatgcgtgaggctgctcttgccggcgtcgacagtacgggactatatacaaatgcgtatccggcctatctggtcagccgacgaactcttcaatcagatgtgagtccctgtcgaccgatctttcaagggaaaagcatccacttactatgcacgtgcttccagttgatcaaccctatctaccggaaacggatatatgcccagtttatcatcctcctaaatcagctctctcaactgaccgagaaggaacggccaaagcatcccaagactgcacagtttcccccttcctttttcgtatcaccgtcagatgtgcgtgctcgagctcgagcgtctttccaggccgcttactgatgtctctctcgtaattttggagcaggccgaatgggcggccgagattactagtcagatcaagtccgagctcatgaagttgcaagacggcagagactttgaagctaggattcgcaagatgatcgatatggacaggcattatgtgagtaactgccacgtctggcatcgatagtaacacctggctaatgtgagttcgtacttgcacttttcaaggcactatggaaacaattgtcgtgcccgcctttagaacaaaaatcggccgaggattcaaccattgcgcaggctgaaagcaatcgaaaacgaatcatcgcacctctacgaccttatcgctggacggctggcacgaaaagtctgagtcgtctcggggccgatcctctgaccggtgtcgagcaactcaaaggcttcaaagtgtaaagatcacgggttgaccgtttcgatcagagacccacgcttacacttcttgcaccagggctgaaactgtgctaaacttgaaagaaaagtatgatcgagaagtagcagaagaggaagatgagaaggcaatgggaagagatgatcccaccagattaggaccgtttgtcgaggtaagcaccatccattgcaagtcttgacacaaccttgtgtatgctgacccaggaaatgcagaacaaggcatccttgtcctggaaagctttgcgactggcgagccggactgacctgaatgcgttctccaaggcgcgtaatggggatcttccagacttggtctcggccataaaggcgaagcgagcagaagtagcgggcacagagacgacggcaccagacaatgaggaaacgaataacatggaaaacatgggtgccgagggcgatacacccgtccctgaagagacggtggagcggactgacgaggacgctccacccgagcaggagaacgctcccgtggatgatgtgaaggaagaaccagaaattgactcgatggtcatcgagtcggaggataccacggtgaaacccgaaccagcggctgatgtgacggtggaacacgttggtgacaagccagagccgactctggatgacgacgacgcgatggaggtcgaaaccaaacccgaagaagcaaaggaggacacgaccgagaccgatgcgcagcagcccgccgtcgagtgacgtctcatcgaaaggcggtaatcatagcacaatgcgttccaaagtagtcgttccattacaggcggaacatctggtgtatctgggtgtctctatcgaatacatataatgggggacgagccgccgtaaagcgggtccatgtggcctctatggtttataaccttttataggaaaacgcaatgtgacgagccattgcctgaggcaattcgttttcgtcatgatctgcctgttgtgcagtttttgaggggggcgaaaggggagaaatgatgaggatgtggggagatgctcgggacagcttcttgtcgatagccatgcgacgaagtgtctattgtagggctcgcatggtcatctcgaagaacaagaaggtggctccgttggctgcagatgcgatcggatcgacaagtcagtattcgctcgccatgacgaggaaaaatgagcatcccgctcgcttaccgaaaggcgacctgaccagtgtcgggatcaacccgttggtgaaccccttgacgccctgcttcttccacgtctggctgaaacaatcaatcatgcccgtgtagacgccagcgccgctctggatcttgctcttgacgacgtcgatcgggtagacgctgaaccacagtgcgtacccggccgcgacaccagatccgacggcccagaggggtgagacttggtctcgagagatgttctgggatttgcagacgtattgaatcgtggcttcgtatgcggtaaagtacgacctgttaccaagggaaaagattccaatgagcaaaggtgactccttgttcgttcgtccagacgaagaacgggttgctcacccggtaccaagaccgtcacgacagatcgtcggtacttgaccctggaagattcccctgatcccatgagcccggtacagtttacgcgcacagtccaagggtccctcatacaaccgcttctgaccgggtttgggcatgggttgaccttgcagcttgatcctaatgttctcgatcggacccgacaggatggtgttggacattcccgcaaaggcgcccgccgcaaatagttcccccaagccgaggttctggcccgtgggtttgccttcggagaagaatcgcttggcggctccgaaagccccgaactggatcgatacacatgccccgatcccgaggagcggggtcagggttcccttgtagaacgcacggggaccttcgctcttgaagaccttgacggcaatgtcgagaggaccgttgtactttccctgaggcgatgtctgctgcaagaccttgctgttaggcgagcgggagaagtccaagtgtcggttcgtatgctactcttgaccacgaggccacgctcgattctactcacaccaagtcgaagggttgaccgaccagtacctgagcagctcctcccaccgttccggccaaaagttccttctgagtcgtgctcaagcggttcgcccggacggcctgggggcccaacgaaagttcagacatggtcttgaacggaggcgggtggttgagagaagaacaagagggagtacggtctgatcacgatggaggtggggatgtcatggaggatggatcacttttggttcgacctctttcaacttttgactcgcttgctcgaacggaaacatttcgaaatatgccaatccaacgcgcgcttaaattattggaaacgcgattgacacggctaagaattgttaagtacaaggcggatcgagacaccaagatacaagatggggaacacggggacatcgaaccaagatgcaggaactgggagtgcggtttgttcggcgccctcccgtcccttccgttctatcgcctccaaccgacccatccgacaaaccctctcgccatctgcggacccatcgcgtcttcccccaacctgtaaatcgaccatccgtcgtgggctagccattcttccagaaaggccgagatctgcaataatagtgacaacgaatgttgtgatatgagctcgagttccgagtcaaccgtgctgctgtatcgagtagcaagaggtgcacgctactcaccacgtccgaggacctcaactcaatgactacccagacgagcgtcctccccctaattgtgtatcggtcgaacgtcgccaccaggggtttgatcaaggcctcattgtagatacaatcgatggcgaggacgagatcgtaaccctcttgccctcctaatccttccccattgctgccaccccgcatagtcgtcgtgggcttgtccagactgcgaaaccaatcgacctctttcacccggacaacgtcttccagtccgttttcccggaggtttcgactgatgagcttgaggttgtcgaattgatccgtcgcggtccatcgtccaaagatgccgtgcaagaggatggaagacaggccggtccctgcgcccaattcgagcaccgaggtcgatttggctcgcataggatctagcaggggagtgatcgagggaagaggaaagtggaattgctgcaacaagaactcggcaagaaaaagactatcgcgccagaggtccatcgagggaacatcattcagtaaagatcacagatggctagcaacttgcagtgtgcgagatgtggagaacgacgactcacctagctctccagaccacgctacctagacccgagggatttccgtcagacgattgagacggacgagacttggttccccttcacacccccgccgtgtgtctctggcgcgtaccggtatctcccttcctgttcctcagcgcacctatatcctggtgtacgacagccgagacggtcttttccctcggtccttcgggtttcttgctcctatgtgtcctcagagtccggccttttgaagcgcccgggatgggagcggattcgttagggaccttcgaggccacaagggtgagctcgatctccatgacgtccttggtcgagtcgagaaatcctagtccgcccttcctcgccggggtctcgtcgtgggatccagtgttggcgaggttcgaatagagttcgaacgtctggacaagcggcgaggcgtgtgaatcagtaacagctggccagctcggttgggtgccttcttacctcttcatcggcgtccgtgacaaaagtcccgctgggatcgagccgtattaggtcggagggagatctgggtatcggaggagcagcatccatgatctgtctcggttttttttagaggttgaggcagtctatccgctgaattgaatgagatgaccctgaatcgacaaagccggcctggtagtcagttgttcagttgtaagcaagagtagagtaaagtaatggtagtaggtaattcgagtaaccttctggtctctgcgcaagtaactttatcaacaaaaccctccggctcgaacctcttgacatcaaattcaatcacaatcgattactgcactcggtcataacctccaacgccgtcaagtagcctgtaagagagcaagcaaggcaactctccaagctgctggctctgccatcatgtcctccagtcgacccgcatcaccatcctcgagcggtgaaccgccagccaagagagcgcgcacacggtcaccgcaagccgacaagaactatgacggggaagccgaactcgtcaggataaagaaacggttgatcaaggtcaagcagctcagggaacggggaaattcgtttggagtggacgaggagcaaggggaggatgccggagaatcgaaatcgaacgacgtgcttcagcggtcgacgtcggttctggaacgaacgaggtcgtcttccccagaattcaggattttgggaagcagttcacgcacagaggcgtccattggggtggccgtcaacgaggtcccggtcgaggtccagttgacgactgtcacgccaacgactgtgcctagcggacgggtgccaacaccgccgccatcattgtcgtcgggacgaccaccatctcctccacttcaccgatctatcctccccaccgctgtccctcggtcatccctcgcccctcttcggtcccaacatccatcactggccccctgtcgctccgtctacagctacactcgtctgaatcacatcgaggaagggacgtacggtatcgtctttcgtgcccggtgcaaccagacgggcgggatctacgctttgaaaaagctcaagctcgaagaggagaaacaagggttccccatcacgagcttgagagaggtcatggccctcatggtcgcaggtggacacgagaacgtcgtcggcgtcagggagatcgtcgtaggagatactctgaaccagtaagttcacccctatccggtggtcccctccgacaatcgttcatgactcccaccagcctgcccctcttttctctcgcccttccatcacataatcccactctctcgaaatcctggacccattcacgctgtctaggatattcatcgtcatgccgttcatcgagcacgacttgaagaccctgttggagacgatgccacacccgttcctccagtccgaggtcaagacgttgatgatgcagctcctcagcgccgtggcacattgtcatagcaactggatcgtgagtgcgcgggttctcgatgttacttcgctggaaaagacgcggtcctttgctcagatctctgacatgttcgtaacgccatgatctgatacgatagcttcaccgggatctcaagacgtcaaacttgttgttgacgaatcgtgggcagatcaaggtggcggatttcggactggcgagaaagtttggggatccactaggagagatgacccagctcgtggtcacattgtggtaccggtcagttcacgcgattcggcgttcgggctaatcggtagggaacatggtggctgaaacgagagcctttgaaatcaatcctgcaggagcccggaactcttgctcggtgcgaaagagtacacgacggcggtcgatgtctggtcggtcgggtgcatctttgcagagctgatgcaaaaggaagccctatttcctggacgaggcgagattgatcagatcggcagggttagtcctttttaggtgccttggtatgcgtgttctttactaaggggatcgtctgataaagatattcaaactgttgggcaagccgaccgaggagatgtggccagggttttctaggctaccgttgacccgcaccatcaacccgatcggaccaccgtgagtgccgctgactttgcagcagcaatccgaggcatcctgattcgaccgacatgtgttcgttgcaggtattcctcgctgaggaaaaagtatcagttcctcagcgatgctgggtacgacttgctggcgtccctgctgcggtatgatcctgaagagaggatcagtgccgaggtggcttcacgacatccctattttgagtatgtcgatgaccgctggcatacagggcgagacatctacactcgctgacatgaatatcgttatctctacagtgaatcgccttacccgaaacaccccgatctattttcaagctttcctagcgtggctgcaggtgaaaagtgaggccgagacaggagcaaacttgattcgcatggaattgacatcgctctgcgactttgctttcacaggagacaaaaaatcaaatctccaagtgcgcctgtacgtgccatcgaaaagccggaattcgacctggtttgaagtgcgacctgcaagtcggcgatcagtgccgtgtatgatgttgtatgcatatcgaaccgagcatgttatcaaatcggcagcgcgttatataatcctacaagataaatcattatgttgttgattcagccgtgcctaggaaaatagtttggagccacaatcgtcgctgatcgcgagacgagatggatgtagaatacggttgcgacaccgacgactggaacacacgaagggggtttagcagtggtcgagaacagcagacaatcgaggttgtgattgactcacagtaaccggcaaccttttcagggtttgtgtgaaagtaggccgaagtggtccacagcatctgtaacaagacatcaattttcacttcagcatcaacaactggtggtggaagcgtctcggtacctccaggcgcgacactcacgaacgaccagatcgaaacgagactgacccccacgacgatggtcaacgcgtgtcctgccaattgcgctcctccgatcctctttcccggcgaatccaccaacgtgccccgctcgtataccatcctgagcgcaggtgccaattgccgcgcgatgatggccatcgaggcgaacaggagaaagacgtgtccgctcaggtcgaacccttcaaagaacctcgctcggatgtcggacccttcgatcgtcgagggcttgtaaagaccttcttcggcgagctgcttcgtcttgggtttgagcagggaaaagagctcgggaaaggccgaaggattgatgtttcggccataagagcagtattcctggggcacgttgataaatgcgctaccggcttgaatatccccagtatcatccgtccgcacgatgggaagttggtcgatccgggtaaggcccgagaaggaagggttctgcgcgagctgggaggggagggggagttggcaaactgcccccgttgtcgtccttacatagctcgtcatccatccggtgacgacgtaccaagcggccaggtacaaggcgatttccagcgctctgtgagctttcgagggaaagtaagggtggtgcgaccttgaaggcgaaaagagggcgtgcgggatcaagaacccaaaggtcgtccacgccgccgcgcgtttcacaaagattcggttgagtatgtttcgcttgtcggcaaagtaccaaacgtgagaggcagctttcggccggagatcgaatttggaagtcgagtaggctgtgtgatagatggcatcccaggcgattccgcaactgaagacacggagaggtccgtcgacagcgagtcagtcagcgacgatgacggctttcggaccggcctagctactcacgctacgacgacgccgacaaatattacgacatgtacggcagggtagttgaggaatttacgaacaggcgagctcttcgtatcgatctgaactcgtctccgtcgtttgggcgtggtcgcaggcgatttcgagcttgtcgacgtggaggatgtcgttacaacgtaggactcttccggttgaggttgttgagacatgttgaatagcaaagtagttcagagtacttccaagaagcttctcagtctgttcaaaggtgaaatatgtgagtttgaacggtagttcgattttgtcgtggtcaaataatgcgaatacggtgttgctttccgaggtatcgacttggttcgagctctatcgcttcgtcgaggtatgacgtaattgactaggagggaaacgatcggaagtaaaatccctcgtcaaattgcttccgaaaggtcgaacatctgccacgtcacttatttcggtggaaagagatcttcaaccaaccaatctcacgactggtcacgattaaaggctcgactttcatcgacttgattgacaccctatcaaacgaatagagctagaatctacctctcgccgctggactgtacatcttgaccttaccatgaagctgctccgcttgctcggtggcctcggcttgctcacgggcacggtcatcgccgacgttgcacctaccgtcgagacgcatcgttacgaatccgacatttcaaagcttcggaatatagtcatccactccatctactcacacaaggacgtctttcttagggaactactttcgaatagtgcggatgcgttgcaaaagctcagaatcacgaatctgagagaaggacacggcttggaagggtggcagggcaacatcaccatcgaggccaggaagaacgaggctggcaaggggggtcaactgatcatcagaggtgggttcgtaaccaatcacaacgctcgcatatacatctaaatcctttcgttgtgacagataccgggatcggaatgaccaaggacgagctcgctaccaacctcggaacgatcgctaaatccgggacctccgagttccttcatcgcgccggggcagcgtcgagcgggaacgaaggctcggacttgatcggacaattcggactcgggttttactcgtcctaccttgtttccccacgggtcaaggtcgtctctctccctgctccatcgcctgctcatccagagccggaacaatgggtatttgaatctacagcctctggagacgagttctccgtctaccttgatccgaggggaaagacattgcagcaccatggaggtggaccttgtggcacggagatcgtactcgatttgcctgaaaatggcgagaatgactgggtgctagaggaggacaagctcaaggagctcgtgtgggttgatcttgcacggccggcttggtcgattttgcaagctgaccactcgtgtgatctgcagagagaaacactcccaattcgcttccagtttccctatctacctccggaagtccagcccagtcccgtcatcaaaagctgatgacgagcttgaaacggaggaagaagaccagccgatcgcgtggcagcgtctcaatgaaaagggcccaatctggatgcagtaagcgcaggtcaccccattcgtgcgatactctcaactcgctaagataagtttgatccactagggagcctaagaaggtctcggagactgaataccgcgagttctacaagacgctcatgggctcggacgacgccgaaactttgggctgggcccattggaaggtaaatcctcatgcctgtccagaagccaagattgactgcaagctcacgatacgtacgacgtcatgcgcagggtgacaccggtagcggtgtctcgttcagagccatgatgtacgttccaagctccgtgccggatgatttctggcagaaaattactgcgggagtgcggaacatccggttgatggtcaaggtaagtgtagcgagagaagatgatccgagaagaggttaattatttacgggtcggcggatcgtagcgcgtattcatcacggacgatctaggagcggactatctgcctcagtggctgcgattcttgaacattgtggtggatggcaagttgcccagttccggacgatccccactgggcaagtattgatgatcacgatcacttgctctttacagccgatgatcttccgtaagtcttcatgtgccatattcacatggaccagtcctggctcacgagctttgatgcatttccagcttgaacgtatcccgagagacccttcaggcaaacaagtttatcaaacagctcaggaatatcatcgtccggaaagctctcgatctcttctctaggatggctaatgacgacaaggaaaacttccaaaagttttcagtagtttacggtagcgccttgagagttgggattttggaatcgagctcgaagaaggatcagcacaagttggctagtttgttgaggttctcttccacccgctcggactttacgacgttggacgaggtgagtaccagtctcggagctggctcattgggtctctcagtacttattcgagaccacccgatagtacgtcgaaaaccgtcgaggagaccagaagcaaatcttctaccttgctggagctggtgaatcgcccgagaatctcgccaagtcacctctggtggaaaagccagttgctcgaggctacgaagtcttgctcctagacgcgccgcccgatgagacggtcatgctttctctgcgaacgtaccggtgagtgtaaaatgtggcagttgaatctgaaccctgactgacgtgcatcacagtggtctgactttccaggatgtctcgaagaagggcctgaagtatggggacgaggacgaacatgaggctgaacgggctgaactagctgcgcagaacaaggcgtttgctccactgctcgaatggctcaagtcgcaatttgaggggatggttgccgacggtacggcagtcatgtcgctcgtcacataaagaaaccgactgatcgtccgacatctccctagtcgtcctcaccaaccgtctagtgtcatcgccatgcgcaatcgttgccggttagtagccgactcacctccagcatctgcgtcgccggcagtcttcctcacacgctatttcctcgttcgtgtctagacaactttggctggtcggccaatgcgcaaaggctcgccatggctaatgccaaaaaggacgatcccatgctcgccatgatggcacagatgcccaagatcctcgagctgaacccgaagagtcctttggtcgaaggcctcctcgaaaggctactcgaactgcctacctctggggagaacatagatggggaagacttcgattctacctctgatgaagtagagttgcgtgagagcgcagcgattctcatcgatacggccttgatccgcagtgggttcaacgtcaaggacagcaacatgtgagtgaaaccgagcagaccggcggcgagcagagattgacgcctcgccgctccagctactttgaccgggtggaatcccttttgcgaagatcccttggcgtctcgctgtccgccaggggcaaagccaacgttcgcccagcacctcccgtagctgccggaccgctccccgaaatcgacgaggaaccgagcgcggacgaatcaacctttgaacccgcagccatgttgaaggacacacagtttgaagattgggcgactatcaagcagcggatgaaggagagcggtgaggagctcgaggaaacaatcttgcagcaaggcgaaaagatggccaaggcggtcgaggatgcggtcgacgggatgaccggtggagggcaggcggcacacgacgaattgtaatacaaagagaggcgaccagggggatgagataggatgggatgcagagcaaatcacaaaaccttgtacgcgtagcatcgcggtcgatcgtgactgacagacactgttgcgccgggacaagaatctgatgtaggtcacccgatgcatatatagtctttcatgattccacaattcgtcccaccccatttgctcttctcgcgccctgataatggacgtgatcggaatcgaaacaaggcgagtatccgaaaaaatgagaccaagcgcgttccactagttaaaggaacgttttatacaatctccgagctacggtcaatcaaaagtttttctcttctttttccagatcctgacgcgccgatcgagacgagcgctcgaccaaagtctggttactgaaacgaaaagaaaaaaagagggggcctcgggtgagagaggttgacgaagcgaaaatcaaaagaggtaatgtcgagtcgcgcgagccgagttgtcgtttcgttcccgcgtatcgaggtacgtcgggggtccggggctttgtagtatatatcgcgagagagagatggagagcaaaagtcgagagaaggaatccgagcgcgaaaggaagggcgaggctgtcgatccgggtgaaccgaggcggcaggccgcgagactggcacgagcgaggcatttcgagtgtggcacgaaggtgataacgccgtcctacccggtaagactaccgagcacggacgggtaccacctgcatgatcactccattggctagcgttcgtgcgtcgaggtccttggcttaggacctctcgccacggagacgacgagcgagttgcaaatctatcgtcaaagatcaaaactatcgatcagcatgtgagagcaggacgatccggcgcgatgcgaccggtaaaaacgtacccttgggctggatggtgactcgcttggcgtggatagcggccaagttggtatcctcgactgtgggaccgacggggagaacgcgatcagctcttcctgctttcgtgatcgaagggcttgtacacggcatcacaatcgcagacttacagagagagaccaagtaagcctcgctagcctcctgaagcgctccgatagcggacgactggaacctgaggtcggtcttgaagtcctgggcgatctcacggacgagacgctggaaaggaagcttcctgatcaagagctcggtggatttctacgcgcgaaatcagatcgacaagttgaataacagtcgagttgaggcaggatcgagatcgagcgatgaagaacgacgatcgacgagagaatgaacaacaagccccatccgtcagcccagcggtcctctcaccacgtccctgtctgacgcgcgcggcaacttacctggtacttcctgatctctcggagggcgacggtaccgggcttgtacctgtgaggcttcttgacacctccggtcgacggggccgtcttcctcgcggccttggtggcgagttgtttcctgcaaatttggaagcagggaagggagaagattcagggtcagtaaagaacaggagaggcgaggtgggggctgagaagacgaggaagacgcggactgacctgggggccttgcctccggtggactttcgggcggtttgctatgaagggaggacgagagatgagtacgatgcgttgcgatgtgtcgagagaatgaaggatgatcgtagtggtgatagtggtggagatcgagaacggggggagggggagtgccggtgatttaccttggttcgggctgtgtgttgtcaaggaaacaaggtgggatgatcgagtcagctctacgttcttgatgttcgcctcttgctcgtctaccctgcaacaggcaaacgagagggtggaaattatgagaatgtgcttacccatgttgtcgtagtcgtcttgatgctgtcgatgtcgatcgagtatcaagaacggtcaaagggtagtataaagtaggtggttgatgatgatgatgatttgtgtatatccaagtggcgaagagaggaagagggggggaggcgaaaggccaccaattccatcaacatgatttagtcgtatgacggagtccgaggtctatacgggcatcgattgaacgatttgaatcatagatgtgcgcctggcatgaaaagggttttcttggggggctgacagcagcacccaatacggatttggatgcatcacctgttcgtagctcattgtggtaagaccccgtcgagcaggcgctcccgcctcgtttgaactcgtcgccatgctatgattatgctgtacaacttcatctagtccggtgcgatttagacgtcctgtttgaacgtgtcatcgctgcacggcgtgtttgttccgctactggtgatcgattgggaggctgcactgtttttccgaacagtcgcgccatatctcatcagaagaaatggcaccacagccagaatggcagcgacgccacccaaaatgctacctgctgttgcgtacccgaggttcgagtactgatgtgcaagttcaatcggcgtccagttcatcgctaggttgtctaaaccggagcttaccattttgtgcgcaaacagggggaagaacgaagccaggatgttccggacggcgctctgggctgcctgagcggaactggcatagagctcgtaagcatccgccaagtacgtgctagcacgatcatgcaaaaaatgggaacgcccctttaacaatgagatacgccccatacgggttatcggcctattcgagactcacaagacccccagatagatggtataagttgcccagttgatacccaccaaagcgatagcgggaacaatccaatggacgtccggacgggcggtccaagcaaacatgaacatgaacacggcgagagcaataccggcgccgcaagagtggatcaatcgcgtctagaacctcgaatcatcttgcttagattcgaactacctcgcgagcaacttccgcacccaacactcacctcgggaacggccattccgagcatctgattcgctcggcgatagatacgatcttgatgcagattggtaagaaacccaagaaatgatccgatcaagattgtgctaaagacgtttgattcatcagcagaacttcgccgtgtttgcactgagcatgctgactcgcctttggaaagtcgaggcgatagcattgttgaatccatattgagaaagcacgagtagcgtggtacttgtaaacaagaacaacacagcccaagcgaacccgagccaagatgatagcgcgattacgatcggctcagtgaataggtaggctattgttaatgtgttggggaattagttttagagctataataggactcgactggccgtacactcactaaggggtcgcattactgccacctttaacgatgtccgaatcgctttgaagcttcgatcgggtgccaagccagaaggcatataagccgagatgtgcgtttctctgcccaatattgcgtaggcgatgctgccgaatccggcaaggataccttgaatctaccgagtccatcccaggtcagcatatgatcgtcgcatcgcactgaacatctactcactccccagtaccagccgaacggaatatatctggtcgcccagcccactgttaccgggccgactgactacaaacatgggatcttgggtcaatccttccgtctccgtacactattgctcgacctgacttacctgtccagcaaatatcgatagaacaaaagcattcattgcgagacccctgtctgacgcagcccacatatcgctgatgctgccggcgaccatcatgttggcacaagatcctgatgccccgagcagagcgcgagtcactgcccaggcggtatagttgcgagtcaaggcggccggaatatgaagcagtgcatagataacgctcgatacgaggaagatcggacgtcggccgaaccgttcggcgattggcaccagcgcaagtggcacaaaggcaaaggccaacatgaatcccgtattcgataagagatactgcgtcgaggagacgtcaaagtacgctattcccgcctcggccgaggagccgatacatctacgcggaacaaataatcgcaccccatcagttctggcgattcccttcctccatgtttctgcgggcttcactaaactcacgttccgttgacggctgaacaaggttgaaagagtagttgaattcagcatccgattgcttccgatgggcttgactctcgtaacctaccggtcatgaacccgatgaagcacaacgggatagcttgctgacacttctttcgcaccggcctgacctcgtattgattccagtcatcagtgtcacacacgcaatgaatgctgcccgaccaagacctaccaatcaaccggcagggtgtcaatagccgaggtttgcactttttcgacctgctcgcgcgggagcgttgcgacggaatcctgaatccatttctcttccacctctagctcgacagctgtgatggccgatgatgagagcgaagatcgggacatggctattgacttgaaagtttgatgccgaggtccaagctatagcctcctttgaacctcggtagacttgtcctttatatagtaggggaacgtcgtactttttcggcgaaggtccgataagagtggcttgatcggcctatcggtcgatcggccgggtgatcggatggtcgtaacaagtcacgtgatgattgcagacccgacatcaagtacatcttggcctttagacatgaatttgtatgtcgtggctctagctctacgggtcggacatgttggtcgaggcatgctacagtttacatcgggactacacccagatcttgatagtctggatctcgaacgcgcgcaagtccaggtcgataagtaagccatccttgccggacttccacacgacctctccttcctccgcctgcatcggttcttccagcaggttgacatatgtagccttgtatgccttgatacccgagctgtatagatgggtcgtcttagtgaaatcccgaggccgtagtgccgaaacagacccacaatgacaattgtcccttggcccgcccgcccaagccctcgtatagtcgaagcacaatcgtcttgtcccccttcgtttgaccgaaagcgtcatcttctccacgtttgatggtgtcgagaacgattccgcgacttcgccgaccgtcaatttgaatccggtttcgtcgaagggtttcaacctgaccctcgtacgtggcccggactgtgtgccaagccgtcagcttatgttcgaccggtcgcgatctcgatcaaactcacctcgcagcggattagtgaatctcaaggcgtcctgcgggatattgctctcgacaagccggccggtatgaggcataatcgcaaagctaaagtagtgcaagcccatatcttgctcgggatcaggcgcggtggatgatcgtagcaaggacagcctacgggaaaagtcgactgtgaacctcaggccaggcaatcgcaggattgggcctaacgtacctcataacgttgccctcgacagcgtaaccatacttgttgtcagtcacaatggcaatctatgcagtaatgaggtttgtcagcacgaggatgacatacaaaggcttagcttgactgactccatatccggtctcactgagatcagcaaagcggtgcgcgactacttcgaacttggcctgatcgacggtagagttccgatgagtaggccggtcgatcagaccgaattgcgtgtcataagtagcggacgtgctgtgaatgtccacaggaagcacgactgcaaaacagatcgtgagatagatatggcagacgatttttcacagatgctcacatttgaggaacgagtgcttctcgtgccagtctgctacggtgttcacacgcagccacgacctcgacgtcgctttcgtttccggaagtactatatcgagagagaactgacggcaaattcttgtctcagcgtcggtgagatagtcatcacggtcgcgggtttgagctcacggtcatcgtgacggtactatttccgaatcttgccaccgcttgtagagacgcccgaagcgttccgttggcaacaacgctaacatccccaaactcgatctcgtggctgcagtccaagtgatatatctccgcgtcccaagcgtcataagcgagcgggaagtcgtcataagtcatgagtcccccggtcttgacgtttggtccagcgagtatgagttctcggtcatccagaacgtcgtaaaagcttgtaatgcgcccagcggtaatggcaaacttgaagtgattgttctccagacaccacgtctccccgtcctggaaggctcggggagcacatcccgatggaggctgagagacgcgattgacgccatcgtcatcggttcgcatcaaggcaagagtagcgccgtcctgctcttgcacaaggcttccatccaaggacgacgccaatccaggaacaatctcgaccacttcggcacgtgccagtcggacaggatcgaccccgacgatcatggcgcctgcatctgtattcatagctgctccctgtggggcgaacgcctcgagcgccttctcgatgaggcggttcacgatggccaattgcttgacgtacatctcgagcgtgtcgtcgatagctttccctagaagaagaaaaattcttgcgtcagatactaggcatatacagaccgggcaaagtgactacgtactgatgctagtccctggcaagacatcatggaattgaccaagcagcgtatccttccatgcagcgtcgagcgcgggtctgttgacgggcgggcgataacttgtcaggcggttagatgcggagacgagaagggaacctactttgggtaattatattggtcatcatgcagcgatgccaaggttccaaagtattcgaggtcacacagtgccttctccatatcgcggttgccctttttgatatccgcttgactggtgtatgtctagaccgagagtcgtcgatagtcagcggcaggcaattggtgtgacagcagccaccttgctaattactccacggtgcaactcaaagtaaagctcgcccctccatgtagcgaggtcccgcccactgtccgttttagaagagatcgaatcgaaaaactcgctgggcttgccgattttaacatccggaacttcgggatgttgcaaagccaacgcagagagtcgttcaagcttatgaccgatgtttgtcagcaacgggcactaaaggagtgggcccgccgaccccgctcaccttgctgagcatacgaggcgtaggtccaccacctccgtctccattgccaaacaacaataaacactcgtcggtcactccgaggttcttgttgtttccaactccctcgacaatttcgatgctttgtaccccagagaacgcgaggttagcacctgacagagaggacgatcgcggtcttggctcgacgaactagttgcactgcgagttgtacgagttgacgggggtcatgtgagcgagaacctgtgtaccatcaagcgagacccagttgaatgtcgaatgcgggaaagcgttaatgttgttccaggaaagcttggttttgagaggaggaataagtaagtcggccgtgacagtgatcagatgcgtcccggcggacctaccttttgagtaaagaagtactccatcccagctaaacgcaggatttgaggcagttgcgaggcatatccgaacgtgtccggcaaccaagcctctcgacatttgctaccgaacttttcctcaaagtagcgttggccatacaggtactgcctgcacagtgactcgccgctaggcagaatgcagtcgtgttcgatccaggcgccaccaacggggatgaatcgctcggccttgaccatctcggtaacatcagcaaagacgtccgggtagagctgttcgagccagtcgtactgctgtgcggacgaagccgcgaactgatggttggggaatctacgcatgaggtcgatctgggtcgaccagctacgagcgatcttttgctgagtgacggaatatgaccacaaccaggccgtgtcgatatgactgagcgtgacaggtggtcagctcgagcgttgcgtcggctgcgcgtcaaacttaccagtgtccgatcgcccaaacctttgcgtcgggtccgctcgctttgtcaaaggagcagagcgtcttgcgcctctcttctcccatgtcacccaagattgtggcagcgattgccctacaccgctttatcatttccgcgaggctttcttctgtggtgaaatggttgcttgcacggaacgcgttcatcatctcgttggcagctctcaaggcccggtgggagacgctcgaatgatcccgggctggcgactgagcgacctgtttaaccatctcaaagtccagttcgaggttgacagcttcagaattgacgtggactaggtcagccgaggccaacttgaagtaacggtcgggctgagagagataaaagaagcagggaatcgatcggcgtcagcctgacaaagggtgagtataccgtgtcttttcgttatactcacgtctggacgttggtgtcgatatccgttcatccccattccaaacattccattgcaagacacctcgatgaagagctcataagtgcctcgtgagacggcttctcgagggacgacgtgctcgacccgtctatcctcctggttcccaggcacgccatccttgtccgagttgggtcccccagttatggctaacggcgtgtggagtcgaaaagaatgagctgtcttggcggcttagctaccgtacacgatacacataccatgcagagccttcccccgagtatcaaagatcaacgcctcacactcgggatcgaattcgactatacaatcggcgagttcgcaaagcaagtcagcgaaccggaagcatattcgaacgatgtccggaagcaaagctacgcacaaatcaccggttcgtcgctctcggcaaacgatgacggtatcttgagctttacttcgatccagtgattggtccagctaggtcccagttgatcgcccttcttgtagagtctagtttcctcgtctcttccgtcatcaaatgccgtgacagcttcgacgaatgagggcttcgtctcgcctggcgcggaccatacgcgcatctgaacgtgatcagcatcgtctatcctctcccgctcgagaattgatgacaagttttggctggcaaagtgaccacctgtaaagagatggagacgcttgtctgtgattcccttgagaagcgggtgattgacagactcggtcactcgttcgtatgatgaggtgcacgacatggttgtttgagaattggtgaataatgatgcaaggaacaggcggctctgcatcccgaatagggcgtcggacggatcgatgaacacctgtctgtatatgacccggccgaagcgatcatctgatctgatcaaatcatgagctctcgagttccgtcataaaccctgcaacgccgatagagtccgacgaggcgccctgcgccctgatcagatctgaaaaccggtcgattcggtcccgaaacccgcgtcagggcgcggtccacagagatcggcgtttccccggtcaatccacttttggcgccaaggacgatcgtgtctctaatctcggcacttttctgacatcgtgaaacgaagcgaatcgcaatgtgtccctgtcgctagtcgacagatcatggtgttatcgccacgaccttccgaaatacgcgagctagccatgctcagcgtatttgagggcgagtcttatcggtgctgtcggtccggtctctgatcggcttgcgtgttgagcgcccttcagcagaaaaaggtgatcaaccactcggagtttctctgaccaatttgttctgaaccagtccgctttctgataccgtgaatcgttcacaagacgtccccgggatctatggtcgagcgtggtggagaaagctggggaccctcgggactccttcgatcgcttgccgctaggatcgacgagccgatccttaagatataagctcaacatgatcgtctgttctttcgaaagatactttgcagatctcatttggttggtcttgaaacaacaagtcagactcgaccagtcacaatgtcgcaacagcaacgatccgacatcatgcaggcgcccctcactccgctcgacgagaagaagctggacatcgacatcgtcgaggatgtcgcccaggagaacccccaagcgcaactcaagtccgaactcgatgctcttcccatcgcgaagtcggcctgggtattccgtaagaccgtcttgatctgcgcactcgccggtttttgtgcggccaccgatggataccagaacaccctctccgcgtcaatcatcgccaacaagggttttgtcaagcaattcggtgcgatcaacgcaaagggtaaactcgctttgaacccgactcacgtctccagctggggaggtatcttcaggtaagtcaaccccggatccatctgtggattgacgtatactgagactttgtatcgcagtgctggacaagttctgggtcaattcggtatccaatggctgtccgacagtctaggtcgaaagatggccatgtacgggttcctgttccttctgttactggtgagctgcgctcaccatgaggacctgcatgctttcgcaatgtgctaacgccatcgatcgtagtccgtcattgtcgaatcggtctctaccgtctggtggcactggaccattgccaagtttattgccggaatcggtatcggatccgttcaggctacgctcccggtcgtatgtgatcgtcctgatgaagccagctgatatgtactcacctagaatcggctgcagtacatcaacgaacacgctccgactactttgcgaggattcttagtcgttgcatacagcatgtaagcccatgaccttgcccctaactccgtcattctctctctgacccgctcatctcgacctaggtggttcactgccggaggactcttcggagctgtggctctcaaggcgaggtccaatgtcaacccgttcgattggaagaacatgatttacactcaatacgggatgatcgggttgtctttgatcatttttatcatcctccccgagtccccctggtggctggtcggcaagggcaagaccgctcaggccaagaagattttagccggcaagttttccaatgttgagggatacgatctcgataccgaattggtacgtcgtcgggtttgatcacctgtgggtcgatttttttattgatctggatacctgtcgccgttcggccaggcgattatcgaagcgaccatcgaggaccagaagcagtatgctcgagcctccaaggccgagggcatcatggccatgttcaagggtctcaacggaaagcgattcctcatcggatcgttccccaaggtccgtgcccctgatacaatttatcgcgtttcgaacatcgctgactctatcgagcatgtaggttttacaacaattcgtcggattgtccatcttttcgagctacaggtggggacacgtcacgtcaagacgctctccagtctatgccagtcgcttagtctttcgtttcctctgtacagcacctacgtcttttctctggccggaaacaaggaccccttcctcggtcagtcgcatcgaatccagacgattccttgtcgacctgttctcaatactgacatcatcatcgcggctacagtcaccgtcattctgagttgttgcggaatgcttgccgtcatcatcgacgctctcttggtcgaaaagatcggtcgtaggcggatgaccctgatcggtttcaccggggcttgctccgggatcctgttgatggcgatcgtcgggtgctttgactatgagaacgcgcagctcggtgccgttttggtgagtctcgacgtcggacatgatgggagattgcgatacctgagactgacgatcacacgctcttgcaggtctttgccggagttctcgccaacttctgcaactcgttccaggtccgtcatgagaaccgaacctcgtctctgttctcgacccagctgaccgaattctcaacattatagagcagtacctcgtacgcctacctgactgaatgtccggagcaacgtttcaaagccagggctacgtgagtgatcgacgatcatggtggtcgttttcttcctctgaccgaccatccttcggtccatcagcggatggggattggcttactgcaacctgtacgtcactgctcgagaaacattcccgcacatcgacttgatactgattttcctcgcttacgttgctatagctacgccatcgtcttcaactttaccgtcccgctgatgatcaagaaatggaacatcagggccgtatggttgttcgtctgccttggaatcccgtaagcgcgcgctcacacttcgctgccgccgatcccgctcgatatctgaccaacccgtggatctctctagtgggactgttctcgcctactttatcatgcccgagactgctcagcgaagcgccgccgagattcaagagatgtgagtcttgcctctctgcgccacgaccaccaccgcattctgctgaccttgactctcccgcgcgcgcgtttgtgtgtgtgtgtgtgatatgcaggtttgtcgaaggtgttcctcttaccaagtggaggggtcacgtcaccgaggttcagagagatctcgaacaacgtcagaaccaggaactcaggcgacgagctcccgctgttcaggacgtataagtctggatggtcccgtggggttgcggtcacagtcagtgagggcattccgccagtacgagtacagttcgataagatttgcaaggcaggaatttgcgccaagttgacgaggttaaatgattgtaaaagaatgtgttgtttgaatcatgatggatgacatcggtagtagtgcactagcactagcgtgctagggatcgatggactatgaatgtacgtgtgggtgtttcatctttatcaaatcaatccagccggacgtagtgttttgtttgactgtcactgaatgacgtgtcaatttgatttattgatcaaccatcacaaccaccaccaccttcgccagcagctagcatcgaacaaacatcaaacaacgtcgtagacctcgactctgtagaaagtcgtcacactcttaccacctcttcaccggatacccacatcctcttgatcctctcatttacccagtctcttatcactctccaaccatgcctcctcctactgcttcccttcgacccgaacccgtccgtacggttggtaaaaaagacaaggacgtctcgtcctcatcaaagaccaacggcgccaacaatgaccgaactcctcgacccgatcaggcggcttacaatgcggagcaggatcaattgaacaaggagatcgctcaggttcgagaagagatggtgagtgtcgagtttggtgatccaggtttagaggaggaagatggccggaagtcgacgagcaggccagtgggcacgcccgccaatcttgtcgagctatgcgggtcgattcgcatgacacgatgtgacgatcctcaacacgcaagccgatggaatcacattgttccgttctctatgtgctctcgtcaccttagcagtgccgccaaagctgacaacctcgacttcttcctgcccaaccacagaacgagatcaaatcccgtctcgacctcttgcacaaccccaaaaagtctagctctggtaccgcttcatccgaggctcctaccgacaggcgatcccagatcaaggccgagatggacgacttgcagggtaaacagggtagcagcaaggcaagtcccgtgtcactggctctcgttccatctcgcaccgaacattgactcttgaatcgtcctctccttcccggacctctcaggctgaccgtggcaagaccctcgatgccatcaaacgtcaccaagactcgatctcgaccaagtccaaggagatcacctctatccgtcagaaactcccttaccgcaacgcgtccgagattcaatcccgtatcacgcagctcgactcgcagatcgagagcggcaagctcaagcttatcgacgagaaaaaggcgttgaacgagatttcgacgctgcgtcgttcgagtaaacaagtgtcgacgctcgagtcactggaacaggggatcgaggaggaaaagctcaagattgacgagttgcgcaaggtgctcgacgatccgcaggtcaagcagactcaggcgaggtgggacgagttgaagcgcgagatggacgagttgagggaacagcagaaaaaggcttacgacgagcgtggtggcttgtttgacaagcgtaacgccttgtcggccaagatggtgagcatcgtcggtggtgtgaaagagcttagtcaggccatcaagctgacaactcggacaatgtcgcacgttctcgacaggacgagctgtacgaccgcaagcgcacatcgaacgccaagcaccgggccgataacgaagcgtgagttcatccgaattccgcaggaatggaatgcaaaacacgtctgggcaaagtcgccgacatcttttcaccgttcaccctcgtagataccgtgccaaggtggacgaagagcgcaaggccaagaacgacaggttccgcgctgaacgcgccgccgaggattcggctcgtcgtgatgaacagatccagcgaatgcgcgaagaggccaaggagcccgcgtttgaccgcgagattgaggattgtggggtcttgatcgggtggttcgagaggcagtacggcaacggatcggctccggtcgagaaccagcagcagcagggcgggttgatgggcgccttgaagggagccatcgatggggtgagtcgaggtcgtgcgacagggtcgactacggtgagactgattgacgagacgcgcgcggtagatcaaatctctcgacctgcgcaaggtcgaagaggagcagcccgaaggtactgtgctcaagaaggaccgtgacgataccgaaggttggggcgcgttcgccgggacgggtggcaagaagaagggtggcaagggaggtaaaaagacccccgctgccgccaccgctgctactccggctacgcccgccgaatcgtcgacccctcccgcctcgacgacgacgtccaacaacatttcgctgccgttttccactttgaacaccttgctcggctttggtatcgctccccccgccaacaaggacgacgtcacccgcgtgatcgacgacctgtccaccaaaaaggcttggttcgaggccaaccagaagcgcaagaccgaggaagaggtcgagcgggtcgaaaagcagattcaaaagatgctcaagaagcagggtggcagcggaggtgccgtcaccaacgatgccgagacggaagagcccgtttcgatcgtcaaggagactggcggtgagcgagaacccaaccacagtgagtcgagtcgtcattgtcggcgtgttgcccgagtcccgaatcgagcgagctaatttcactacgacccggctttcgactcagctgtcgctgtcgccggagacgctaccaaggacattaccatcgaacaaggcgagcaggtgagtctttgcgagaccgtcgtatggggcgatccacttgcctgaatcttgctgagcacgcgtgattcaactctttgcagctccccgagactcctgaagaacggagtaacagcgtgcaccagatcgatgaagaattggagcaggtcaagagcgaggaggaaaagtccagctgagcatgaacgacgtcacccatagtgctagcgagtgatgcgagttttcgaggtgtacctagttgatcgaattgatctgagtgatgatggttacatcttttatcaatcgatcgatcgaaatcgtcgtcgtcgttgtcgtgatcatccgccgtgtcgaggtcggcgtctggctttgtttcatgcgcgaggtcgctcgaatcgaatcgaaatgactcgaacctgtcaaacatatcatcatcttgctcgaccaacggcgtcggcatcgattctatgtcgcacatgagatcatggcgttgagctattcctgatctcatcatgctctcgacgaccagtagcatcgccttggcgacaggcatctacttgccatgtcaacaagtacttcgacatcgacgagaacgtcacgccgcccgcaagtacggtcatacgtcccgtgccgatctggctaggatgaccatggacgaggctggggagatcttgcgtgaggccatcgagctcgagttgaccgacgccttcaacatcagtttagggtacgggtttctgcaagtgagtcgaacggtaccgtgtgatcgagcgaacggacagctgaaaggtcgttcgtagactctggtcttccccgagtcttcggcactgctagtccacaccaaacagatccacaacccagaacaatcggacaaacgactctttgacacgtccatgctgatgaccgagatcgtctccttcacaccctcgtcggaccgtttccgacgagccatctcccggatcaactttttacactcccgctacggcgaccgcataaccaacgaacagctcctctatgtcctcggagtgttcgcttgcaacccatggatctgggccgagcaatgggaatggagagggatgaccgatctcgagatcgccgcgagtgggacgttctggctcggggtcggtcggatgatgcacatcgacatgagcgtgatcaagggtgtgggcaaggacgatccccggtacattagcgatcgacaacaagctgcagccggcaaagacaaccgggacgacttgacgggctggacagacgggctcgattggatgatcgacatgcgggcctacatggaggcccacgaagcccagcatctcggccagagtcaggataccgacgacctggtcgaagagacgttcagaatgatcctcgacccgttgccacgatggatgcgaggattcatgcgaaaagtcgcaagcgtcatgttcgaggaccgctttcgtcaatcttccgggtgagtcgaatcggtagtgatgggctccgatgaaacctggtagacagcgagctcatgtgaatggcattacaacccagcgttcctacacctcccaaatcggtcgaacgcttggtaatctactcgaggatttttaccaagtatttccgtcgatacgtcgggcttccccgccccgtcttcctgacaaatcgggccgtccccgaaaagcccaacccggagagcgatcgatactgtcccggagcatacgaagcttacccttactacgtcagacctaccttttggaagcggttcaaccccatcgcgttgctacgatgggcgtcgggcggggatcgaccgggggacaagcccgaaaagtatcatcccgaggggtacaagatcgaagagctagggccgccgcgatggcacggcaagggcatcgaatggatgcagggcgatgtccaaaagggcaaagacgccgttccgggcggtagtacttgcccgtttggtcttaccggatgagatcgttacccacctctcagcggacgcaagattttgacgatgatagtcagcgatgatgtgtgtacgagtacctcgattatacccatatttttacctccatccgtgtgccttccgtccattctaattacagcgatcagcgctttcccacgtcagctgtgccgggcacctaggcacgaccgacagactcccacccgatgagcagatccgatcgaggtcgacgggcttgtcaaagcgataatagctcgggcaggacgagatgtgacggggacaagaatcacgtcttgtaatgatatgttgcatctcaagcatttcgaggcgttgttgaacacaatcctgtgtcgtacatgcatttgaacacgaagacttgcgtccttccgaccaaatgcgactctcctctggcgggactttgcgaatatcacctcaccatccctccaaaggagtcaccgttgtccgaggagccgaatcgcatctcaaatgtgcaaggcttgccgaagtaacttataagcgggttcaacgattgtggccatgcgtgctaggcggtgaggcaatttacaggtgtgcagctctcgcggcgcccgtggcacaaatctcatgaaacgcaagaatcagatcgctcgaccccaccgaacagaactctaatacattgtccctcacaaacaagatgatcgttaacgggttgatcgaacgaaagtgaacagtctatacgtaattcctgacaacacgacgtagctacacctcggccgatccctgcttcttggaaccggtcccgagtttcttgacggcctcttcggcttgtttcctaatcgcgtcctcctcgtccttgttgcggtggcgacgggtgggcgcggttcgtcgtctgaacagtcgactcgtcgagggtgctgcttcgagaaccccgcccagaggtgggttgtcgacgatgatcacgccaggtggggcttcccgaaccgcaggaggcttgtcattggaaacaacgcgcgaagtccttgacgtgcgacggaccgacaacgcggctctcaagccacccgtacgtggtgagccggacgctttggccggcgaacccgtcttacgttcctcttcaatcgcgtccgagtggtactcctgcacgatggggattgctcgtgggctcttgcggtccatgaccgtcctgctgcgaatgacgccgccgggtccgatactagcttggagtcgcgtcgggtcctcggtcttgacatagtagcctccgacgggcgcctcgtcgtccgaatcggatgggatcatcaggtcgctatcagctctcacaggtgctggaggtggcggcggtccaggcggagcgggtttggccgccagagtcgtcggttcgcggctcgttcgccgctctatcgcggcactttccgtcttggaggtcgtggtaacaagtttatcggtcgccggggtctcactagtggcgggatcacttgacggagaggtcacgtcagggttgactgtggggggtgcgaccggagctgcagcctcggtctcatctcgcgtgctttgggaggttacgatcgaagccgcgggatgaaacacgtctgaaccggaagctgccgcgtctgaactacgggacgcgatcggttcctaggagtccaccttggagtatcagtcgacggcttcgtttgaaaacagaaggggccgacggtacgacttaccagctgcatgcctagcagaaagtgatcctgatgttcgatcaggaactcgagtaccgcctggctcagtgcgtgttcggcgggtctcatctcgtgttcagtgtgcgagatgatcccaggttggaaaatgaccgccaagtctgggtagcccgacatgggttctggtcagacgagaccatgtacaacaacgtgagaccacaaacgacctactcggtgcggtcatcaagttgacctctgactttcttgcaaagacactcaacaggtcgagcacgtatagtaggaggtactgattcggcttgggcatcttggcgatcaagttttggtacgttttgatcgtcacgtcgagcgagttttctgccgtgggcgtgtattcccggcaattgactgtaggggtgtatgtgtttgggatgagtcgtcgtaaagtcgacacgacgaacgcgaagactcacgcagattgttccggaactggcgggcgtcaaccgatgccgtcagcacccttgtcgatattcatctcgacccgatactcacctcgtggtacaactcgtgggggatgatgggttccggcatctgcgtcaagtaccgcctcaggatggtcgccacgtcatgcgtcgtgtacgtggtctttttccaatccaggttctttccgtactgcggcgatgaatgagcaatcaccacggggaatccggttgagccactttttccattcgtcgaatctaatccatgtggctcaccttgggtgggttgtcgaagacggcctgcaactctttcatccgcttggctgatcccgagaccctgaacgtgccaggtacctcggtggccgtgtccttcaaatacaatccgcatttggccacaacgacagggacgtacctgcgagtcgggaaggaaaaggaggacgcattagcccggtgcctttcgtctcattcctcgacaccactgtcatcgcgatttctcggtgaactcacccccagatgtataacccgccgtccactttggccgtcgagatctggacgctagcatactccaagctcttcaagagtggttgcgcaaagacgtctccctctgggaccgtctctgatccgtatccttcacctacgctaccctttctcatcctcttgctcgagtccggttgcaacccgcccaagcccacacccgtcgcggtcgatcctgccgtcagacccgacgtggagttggggttgctggtaggcgtagcgctgttattgttattattgttgttcgaggacgatccgccggacgagaaccccttccaccaggtcttgagggacatggtcgtcttttccttttccttggcctgttgctgttgcctgctcgtggacggggtgggcattttggcgaattgcaacgagggacctgtcgagacaggaaccgcgggattcaaagggacagtcgtggtcgtggccgtggtcgtggtcgggacggtctcgtcactaagagggaaatcgtgtacgacagccgggcgggcgatggtgggtttgttttgtccagcagcgtcttccgtttccttcttatccaatcccgaggcttcaacgacagactcttggcgagatccagccccgatccttccggctgaatcctcctcctcctcgtccgtcctcaaattggtcatggccgtgacgaaactctcggtgcgtccgggaaccaacgattccctcctcgccgtcgtctcatcctgcacgtccaatcctcgctctacggtaccatcgctctccagctcgggtgcatgtgtgtagatgatcgtcgtcgtcgtcgtcgtacccatcatatcggtatgatcatgcaacctctcttcgacggccgggtcgaccggtcctaggatgacggcttcttcggcgcgtctgacctggtcttccctgtgttccctgtgttccctctcctcagtcgtctctgcgggcataatttcctctccttgctccgacaagacgctcgatgatctcgtgaggtcgtctttctccatgtcgtggttattgttgttgatgggtaccagtgtcgagatgatgtcgaggcaaggtgaggatcgattgatcagaggtttaacaccgtacgcgacgagaactatcgcggtgatggtcgagaggttgatttggtcggggtttcggttgatgttgatcgatcgacaatgtgggcaacagctgatgctctaccgacgatgctacctgatctgccaggcgaaatgatctgtctggatgggaggtgaagacggtatctactttgacgattgacattgacctacctccccctccctcatatgctttctgtcgatgacgttatcaaaatcctcgagaaacctccgaaactcgacccaaagaggaaaaaacagtcgaacagggaggactgccactatccatcgccaagatacagttcaaaagcatagagacacacccctggacctagattgtgaattacatctccttatctctcgctggaatctcgaagcggctcagaattaagtctggatctggatgacggacgtatcgatatccacgtcgcgagaccgatcgtcgtcgtcgtcgggaccgccctgtccgagcgcgcaggttcacgcagtcacgcagtggaaccatcgagcgacgggatcatatacgattcacccagactctcccaactacgaatggcgagtcgctcgcatggccatctccatcctagcttgcggatgtcaccggctcgttgtgcatcatgctgcagcttcttacaatcagaggctcaccgtcttccgcgcgtaatgtgtcaagcacagagcgcctccattattattgagttcacgtgtgtcgcgctatcgacatgatccgggtcgcgaagagcatcaaggtcatcgttttgaaaaaaccatcttcaagctcacggagcgttgccgatctgttgcttgttgcggggtgtcgaaaggccacctataggatttgtctagggagaggcaacggtcgaaaggcagctcgatgagcagataagaccagcttcagagtggcccgcaggaactgcgagaaagatcgagggatacttggcgcatgtccacagtacacactggtatcgatgcagggttctgacccacgtcgccaggatcactgaggtcctgaagcattcccagcatttccacgatcgctgagccgcgaactcgagaaggctaatagtcaaccgcgacgagcgcaaaaaataaatggaaactccgttcatatcccttttcaagtgtcttctgggtaagccataaaacgggtaccagcgacaccccctcataccacactgatccatggaggacgatcaggaagtccacatcaagtacgtcaagtctgtcattctcgattgaacctggcaggccttgtctttgcaatttttcaactggctcgaaaacacacagtaacttacatggagcctgttgggattactgctgttgacatgaaaaccctacaatctgcgttcaaaggcaccgcagggctcctcaggtacccagacagggacccaaacagaacgattattccttgactattgcgacagttgtggggtctgattttgcaacaccaagccggtcagatgcgacgagacggagatcctgaatctgctgacacaattacctagttattcgtttgcaacataccatgctagatggaggcgaaatatcactgaaccttgcgataccaaagtcagtcccacggggttcgattcaacaatccgccactatgaaaggcgctctgggatactctgctgacgaactcatacgggtcgttggggaatgcacggacgcctggtaacgatccctcgtagctgttagagcatagctgattcgctgggttccggaactgcctctgcgacacgggtcaggcagtcggcagtgctgtccgcgtaacgtcgaaaggaccgggagtcgacggggcgatacgtgttcacgaatggtcaagagggcgtttatcggtagttgatagatgggggggcaatagcaaaatgatttttttctctttctgcacactcatcgcaccggaaggcaagcgaagactgaatttcgtgtaaatgattgaatgaatgttgtctatcatgattcgttcacggacacgatcgtccgatgaggggaaagtaagtgctgtaatagaaaccgaccatctgcatgtccaggtatcagatagcaaatacgggtaggacggtgaccgatcagcttgatactcactcggcagatcgctcgtctctgcccgtaacaaggcctcccgtctcgttgccgcgatccccgctgctagatgtctcgccacgatacgctctctcgccgtctcctcgtcgaccgtgatgacccaccgatcatcgaacgaacttgcggcctccttccatggttctaggtctagacagacgtacaatccttctaccatgacgatatcgtgttccggcaagagctcgattccatcgtcgacgggatccttgagtgcatggtcaaacgtcggaaacctccacgagcgagttcgatctcgcatacgttttacggattcaataaagcttccgacatcaaatgtatccgccgcgcctcttcgcgcgtgagcttgaattgcatccggaaacgcgtccaactgcgacccgaaggttgattcatctcggttcgctgtttgccgagcagactcattcaactcacttgcgcccgtgacaagtgccaaccgtccatactaatcacgattgtcctcgccagacccgtctggttgattcctctggccacctgctcggtaaacgtcgacttgccgctccctggaggtccgcttatcccgatgaccagtcgcgcatcgtttgccagctcttgtcgctgtttcaggacgtcggcgatgtagatttggacggacgattgcatggctggtcgacggatcgagaggctgcgtatgtacgtctgcaaagaacctgcgcttccaaggggtatcgctcgatccattatttacaacttgattacaaccttataattcccgtagtataaccgactgatccctgtcagccgtgacgaccgccgggcgacaccctcccgaacgacgatgacactcataattgccattctcccgcggcaaaggccatgtccaagccgtgattagggtcggccatcgaaggatcattcccgaacgcttgaaaccttgtcgatcaaacacggtgagcaagtcagtctccgacacctcgggaccctttcggcacgcagaggtcggaaaagtggctcaccagtcggaccagttttcgatgctgacggggttggccgaaacccccagataacccgagggaaacgcgacggggaaggacgaactgatatcggcgggcaaaaaggcgctcaggtcttgcggagtctggttgtggttatgcaagatcgattcgataatgttggcaaacgagtctccgagctggtagcgcagatggacacgtcgagtttagcgagcggtcgaccgcttggatgccctcgacggcggctcaccgattgaatcgacgtgcatcgtcggaaccaggccgacgtcgaaaacaatagctacatgacgacgattcgtcagtcggataggatagggatctgcattccatggcgaacccgccctcacctgcttccagtaatcagccgacgggtcttccggctcccagacgaccgaaagcaagagcgtcaaggtgctttggaacgcaaagaagaggaggtaccactgagcaccacgagatccgaccatggggtcatccaacaaggcgaattgaccgatatccgtgaggttctcaatggcgaggcttcgacagatgctgcgagatggggacgggcaatgaggtcaaccacggtgcgcatcgcacgacaacacgtcgagcgaacgacctacttgatcgcttccctgtttccgcaaggcatctcattgcgccgaatcgagtcccatgccgccgtcaacaagatcgggcggtacaagatggctcggaaatctcgaatcctccatgtcgtcactgcccgcgcaaagaaccatgggctaggcgaatccatgtccttcatgtaatcgggcgtcgattgtagcaaggcgagcacgcgggcgtcgtaccgcttgatctgctcgtacgtcggggccggattggcttgcaagatcgacgagtggatatcgctcatcacacaagccagtcgggcttgtacgatcagggccgagtagatggtcggacttggggattccatgggcgcctcaaaggtgctgaccgtgatttgctgggaagtgaagtgaggtgagcgtgattcccgaatttcgttgtatgcgacggctcacttcgtcgctgcagttgaagggtagtaggcaggacgtcgttctcagtcgaccgagtccaaacggccgaccgaacgtgatcgaacaacctgcttccagcgctgccaatgtccaccagacgcgccttcgtgtttgagcctctagcagagtcattttggattcgtcccctgaaacgtgaaggccctgcgggaaagaggatacgatgagtcgacgtagtcaaggtgaacgatggtgcgctagacttgccagggcgatcgccatgcgtaacgccaggcccctagaacggcgagttcaggtcggtttcgtggccagcgatcggatcacttcaaacttacaagcagagatacccagcgtttggtcggttgttgcgttgcctgggaggagcagtgtcaggtgcaagacctcgatttgtacgggccgctcatactcacagataattggacatgatggccacgccctgtacgagctgcaacgttccctttgcaaagagctctttcgcaagcgcttccttggccttttcgtagtacctccatccgtcatcgttgacttctcggttggcaatgtcgaacgagcccatcgcaaagatcttttgaaagcgcgtctcgggctgttggttacggaaacgcgcctgagatacggacgctactcaccatgtagagcaggacctcgctcccctgctttttgttggtcgggacggctcccaagatctgcgcccggatcgtcggttcgtgtacgatcggcgtcaacgtatctgactcgacggtcctcccgtcagcttgtcgacaacgctacggcggtcctcctttgcgggtacttacggaaatagcgaaagtacgattccaccagaggcatcgtctcgatcaacggcgggagtacgaccggttcactctttctacccgatttgggtcgggcggggacgacttcgagcctagcctcgtccgcggtcccatcgaccgacgtccgtgtttccggggtattgcccgtttggatcgtaaagatatcgggcaagactcccggatgagcgtcctcgtacaacctcctgatagcgtgcaagaacgtcgcgcccgaggagagccctatcggtgaacatgcgtcgcatcagccgccccgctcgctctcatcgtcccatctaccttgtccgacccgaaaaaaaactgacctagataactcgtgcccgaatcttcccgtgccaggctgaccatgccatccaacctgggttgccctgtcgtgcgattctgttcctcttgccattccagatcgaccggctcgtcggccctggcgtacggtggaatcctcgaggacgatgctgcggccatggccgatgcggaggtggaggctcccgggatggtgttgacgttcgagggtatcatcatcggatgacctgcggtggtgatgttttcgggaataccggatgagggcatgtcgaacggtaacggcggagatggacgtggggtggtcctggatgacgtctcgtgcgagtactatctccgggattgcgatcgtcagcccgtgcaggtcgacaatccgacaattagggacgaggaggaaaactgaccagacctcgatccatactactagccacccgctcggggatcgatcccagagtcgtctctgtctgatttaacgagaacgtgccatgaccggctacgtgaccgttcatcccgcctcctcctcctaacttggatgccgattgcgcttgagccgataatcctaagccgtgatcgtcttgccctggtttgttcaagcccgacaacaacgacggcgacgacgatgcggctgaaagcttcgcctgtaacgtcctcatggtccggtcggacagggcgagatcctctgcttccctgaggggtacgtcggggaaagcgacgttccatatgatctcgtgcaagtccagcctgtaccgcgcagcacccgtgggatcggtataccaggcagcgagatatccggtcgtctttcagctcggttctatggcacgtcggtatgagatgctaggacgtaccggtcttccaactcggtcatcctcgctcgtgtcagggctgacctgcggggcaagatcgagtaggtgcatcccgtcggatcgtgtgcgcatcgtctgcacggtcgattgccatcgcacttcaacttgcgattgcctgagggcgtcgcgaggtttccgaaggatggtgacaaggacaggtgaacgaggtcatttacgaggtcggtcggacggatgttcgtacgtgttgggactcacgacaaatgtcacaggcgatggcgcctcgagctcgtttctcacctccaccggcgtgatgttgatgtgattcgttccgatcaccgtcgatctcggactgactggtcatactactgccatcacggggaggtgccgatgatgccatcctgtgcgtcgaatttgccaagacgacgtctgtgtgtctgtgttgtgtgtgtgtgtgtgtgtgtgtgtgtgtgtgtgtgtgtgtgtgtgtgtgtgtgtgtgtgtgtgtgtggttggatgctggtatctcaggttgtcgatcgtttgaacaccgaactagctcgcactcgcctcgatgtcggccggtcgttgtcgagtgcaagtctggtttcttttcgagacgccaacccggtcggttcctggtgcaagcagacagacagaggtgatccgagctacgctaccgacttgcggttacgctgtctaccttgtcatgtgttgctgctttggatgacaggcaactctaccttgctccctcgctcgctcgacaacctgccgagtcgaggttcgggagaaactcggatcagctcgaaccgaaagtcaggtatcatcaaatcagggtagagaggtgtacacaaccactacgatgataactactttgtccatgagccatcgtgattcactcgcaaagtatttagaatgttacctatatgttggcaaagaattgaaaggaaattccgtcgacagcgactaggtagaccgatcacgaacacgatctgaacgcgataaccatcatagcaactaccacctgaactgtccaaccatggccatcgcaatgacctcgacgtgagccatcatgaccagctttgaattctggcagcactcgtcaagatctgataagtattccggaatgttatcgtgcttgctcatgggatagatcgaacggcacgtcgactgccagccaggaagagttccgagtcctcttcatcggagctggaaacagtcagtccggctcgaaacgattaacacgtaacatactgaacgtgattaacaacaccttgatcgtctcgtagtcaactttggatcggatgagggtgtgagtgctcctgcctcaggatgaccacatcacctctaactgaaccttctcttctgctctacctgtagccttggaagtgagtctctcttgcagtcggctcaaccccgagctcggccctggctctgaaaacacccccgctgattgcccgtcgtctcgcatcgacccacctcagccactcggtccgactcgaacgattcttcggctcccgtctcaaagtcgtcggcatcgtcgacccagcgacctcccgcgccgaatccgtactctccctcaagcgcagcacgctcgccgggacggcctacgaatcgtgccagatcttcccctcgatcgcccagtccatcgagtcgctcggcgtggattcacacccgcatgccatcttcatcggttgtccacccgcttaccgggggacgacggacagttcttcgggcaaggacgtcgaatgccagctcgtcgccgggttcccttcggccggtctcctcgtggagaaacccgtggcgacgggtccggtggacgaggtcaaactcgtcggttcccgattggtcgacagtggggttcccgtctctgtcgggtacatgttgaggtacggagcggcggtggccaagatgaaggagatcatcgccgagaacaggttggaggtcatgatgacttcggcgagatacgtcatgggtgagcgtcggggcggctctgattggtatcggcatcgtcatttcgtagactgacatgccgacgatctcgatcgtatggtagcatacgaaaagagcgccaaggtacgttcacgttgggaacgatcttgacgtccctcgatctgatccttggcgcaactaccgctcagcccgcatggtggaacaaggccatcgattgcggtcctatcgtcgagcaagccagtacgtacagcgccctgaccgaaccgcctatgccccccgactcacgtggtccgtcgattcctcgtgatagcccactttgtcgacctttcccggtactttggcggtgaagtcctgctcgactcgatctcggcgcactcggtcgagtggtacgagaaacccggtcaactttcacttgtgagccaagatccttgcctcgctcactgaaaccgttcacttatacgtatcgggggacgactgcgtagatgcccatcgacgaatcgctcatcccggagcaagaacggattcctcgattcacttccgcatcgtggtgagttcgggtatcctccttatgccgccacaatagctccgagtcctgacatggacttcggctcggtatcggacaggaaatacgagtcgggtgcgatcggccatctagagcatggagtggcgttgcaggggaccgaattctcgaccgagttgacagtctgtgagtcgcaccgaggtggacttcaggcgcactaccgttgtcctcatcgcttcacttttcgtcacgatccgccatagttgccgacggatatcagttgaagctgaacgatccttgtgagtccgagatcgaccttggctgatcgccccgagttcggtactcaaatgcccaactttgcgcatcttagacaaccgtcccactctctacgtccgacgacccggatcggacgccgaagaaattcacacgttccatgacgacgacccgttctatgcagagatctcatccttttgcagcgcggtcgagggcaagaaggacggcgagggtgtcatcctgtcgtcctttgaggatggtcagtctgccgcgtatggtcataacctcaatggcgtgaatgaaaagctgaaagtccgctactatcgactctgcagccgtcaagacgtacgaaatgacctgggcgatccgtcgggcgagcgaaaaatcgcgacgcggcatgccctttaccgaaaaggcctgagacaggaggcaaggtggacgtttgggttactgtcgctttcgtgctgtacttgtagatatggggggtttggggacatgcattacatcgcattgcggagcaagcttgcggattgacaagactggcgtcagacgagacgctgaatggtccacgaggatcctgcttgtggcctatttgccgggaagggagatgtcacaacatttaatgtacgtgacctcgctaagctcccggcatccattccctactatctgaacgactctcggccttcaacttatagacagcgttaggctggccatgcgaagatggtcaaccagacgtggcctctgaatcttgttcccttcgtgacacttgtacttgcttgcgatcgcctcgtaaggactaacccgacgcgttcatttatcaagtcgaccgcgtctacagagcaagccagaccgcccatacagacagatcgcaatgccaagtatccgagaccactcggaagggaaagaaccagtccaagagatcgttgactatgtcattataggtacctgtaggtttcttctcgcctcctctctccctagagagcatcgcgcgccccgaccaactcagttgatccaacctcgactcctaaatagtcctccccatgacttccacacgaaccacccaaacgtgcccaactcgctgcccagcgatccttcgccgtctttgccaccggagcttcggagggtaagcctacgtacggtcgattcgtacgaatgatccaggaggtagtccaatctcgccaacgcctgatccagcggagtcgttgaatcttgcgccattggacgtggttgcatgaggatcgattctatcgttttcgtttttgcgcgtttcagaatcagtcgatcagtctcgtgccacatctctcgggccagttcgccgactaacctgctctgagaaagatgctcgataagactcctcgtcggatgtaccattcccagccctgtccctgccccatcctcaagacctcggcctttcctccatccgtgcgtgtcgctatcgtgttggttgttgcattcccctgacctgggttttggttgagggcgaacggcggggcagagaggtggatggcctcgtctgcgatcttccaggcgtaggcgtacgatctgaacgggttgggcgggagaggaaagggaaggtgatgtggcgtcgtctctgtaccattatggctccttggacgggtgtccgattccacgcttgtcatcgttgaggaagacgagctgacgagggtagaagaggtagttcgcggagacccagcctgtggtggcaagtaaggctcgaattgggatcctgattggacgtgatcgatcatccttgctacgggtcctggcaagctcagcgagaatggttgaaatgcgggggattggatgatcgcgtgtgcctagtacgcccggaatcgaatcgtgtccgccgttgtcgtcgacatggtcatcgggtgacgatagcagtgagccgcggcagtttgaatagatgcaatcacagatttgagcaacatcagcatcgatctgcgagcatcatatcaactgacccatatgtttctgtatccgaggactaacctgtacgacgtgttcccccgcagtctcctccgtatatgccaatcgtctcctcaagacctgtttcaatgtctgtttcgtcatcgtctctgtctgcgagtcgcctggggtggacattcggtgtatgccttcatcttcccacgctttgaccaattctctttccgcagtggctagatccccaaagacgttggtcaagaggtacgtctgttgatcctgtgatgtcaggctcgatgagagcggggaggatgacgagtcggcaagacctttttgtacggcttggagggtgaacgagtgggccttgatgtgaggcaaggaagctttgaggatggatgatttcaggcgagacattgcgaggtgtggtaggtttggtcgtgaattctattgacggatatctttacactctactgtatcaatcgtagacgtcgtcggtgacatgtctttcctgctaatgaagtcatggatgatcgaggtcgaatcgagtctgttcacataacctagctactgcggtacatcgagatcgcgaagtggagggaaagtgagtcacgtgattcaagtgtcgaggtcattaccagacattccgtcaaacttgaaccaaggtcaccgtcgcaggcagtcatcgatcacttgaagtcgtcatacctacactacctcccacttcagctaccgatcagatcgtgagcgagcttggcgataagaaccagaaccgattcgaatgaattcgaatttccagcagatagatcccagctgactgtaggtgttcgatcgagaggaggtgaccggatgtaaatttacgatctacatccgatgattttacttccgacatctgctcattcggaagtaaatatcacgttacccggagagtagccgggtcgagctagagccatctcgacaatcaaccttggcaatgtacaacaagatcgatctcctcatcatcatcaacaactttgtcgaagaccaatactatcccaagtacacagcactacacgacacaacccatcgatatgagcttactaggaggcactcagatgcccagtccgaccacggtaagttcgagtcgcaattcatcatcaagagggacacgcactgatcgaccggatttcatctgtccaggccgagacgatggccaaggtgagtcccatttcggacatcgagcattgctgtcgatcggaaaagctgtcgctgaacgtaacttggcctttacctggtcgtctggaatgcaatgtaggaacgagccaacccgacattcgatgtccgcaaagtgagtccaccccagctcctacctctcacccgcacctgggacataacaagatcatcgttaagcctgccatactcaccatcttgccttcttttcacgttgcttcttgtcgctcgccgtagctctcgatcgccatgcacgggtcggccaaggcgttggagctcaaggaaaagttcatgaccgaggtacgcgtcttgtccaccctcacctctatcctcacggtcttctgacattccctcctttttacgtcttgctacttccgttactactgcttatccctgcactcccgagtagatctctcgggacccatctttcaggtcacacgacactcacgacctgtccaaagatgccatccgggaacgcaccatggaaaagttcgggagcatggttcattacgtgatcaatgaacctctgaacgagtttaacctgaggatgcaggtacgtagtctcatctctcatctctgccctcgcctaccccgttagcatcgccttgtggaagtggaagggcagatcgttccccgtcaaacgggatggatccgctgacatgatgatccccctaccccaatgttgtacgacacagctggtcagcaccgcagacccggcgttctggacacgtttcggagtgcatttcggcttgttcctcggagcgttgcgtggagggtgtactcctgggcagatgagtgagtcgatcacacacgggtgtcttcgaaccggggtcagctaggtctttatttctgggacggctgattgacgggttaccatgcatgaccaggttattggatcgagaagggagctatcgggttgaacggagtgatcggttgtttcgggatgaccggtcagtcccaaccttttccctgcattcatgcttacgtccctgaaccgcgctgacgtcgatctttaccgggtttgaccgtcctagagctggcacacggttcaaacgtcgcaggactagagacgacggcgacgttggatgagaggacggacgagtttgtcatccatacgcctcatctaggggcgacgaaatggtggatcggaggtgagctcccccccccccccccccccccccccccctccccccccccccccccccccccccccccccccgacccccgatcttccggaattccgaccacctacccacgccgaggatgcccgtctacgtctagacgaagcgcggggagggggtcgtacccattccccgggtcgacatctcggatcatagctctgactggcaacagtaggaatacctcctcacacgccctgctagctgcttcacccgtaacgctgtgccgagccgaggctcgagctagtagtacgcccgtgcaaaattgtacctgataccagtggctagtagagggtggcaaagtttcgaacaatctcggcgctgattagcgtgttgtgcgggtggttcggcgactgatccgatccgatccacccacagaattatttgatccccgcgggagacatacagggggaagcggaggtggaggaggtacgcaagaagcgagcgggggcgaaagggaccgagaagcgtggattacagttcggaaacctggtggcaacaagagagggggaggacgtcgagatgatggtgaataaccgtcccacatgctatgccgtgggaatcgattcggggaatcccataatcgttgctgaccgagcaaacagacgcgagaccgcaaaaggatccaagcgcatcaagggattccagcaaccagcatcgccaggcgagcgatgtggaggcggtcgttcacatctccagcgaaggctggtcctctcatgtaagacgcaaagagagacccgcagcgcaggaggatgcgcgggggacgtgccggcgggcctcggagctgcgagagtttcgatcgtgatatggtttcgacctcgccggaaccgcttcgtcaggcgtttgaaagggagatgcaggggaaacggccgaggttcccacctcctgtttttcttccaccgccgaacgtctgatgattaggggtcgaaactttcccttgcactcccgaggatccgagatgccccgggcatgattccagtgaactggcagatcggcctgacatctttctactgttcgacctctgctaacatttatcgatgtttcactcgatcgaagtcttgatctgacatttaaactgttgcatcatcagccacagccctacgtcatcccccaacccgaatcgtgacaatccccccgcatacggcagtcttcggaagcaaatctccctctttcccctcttcggcctcctccctcgccctgtgccctcctcctcggcccggcctttacgcacgacgacactcacactacgtagaccttggtcagggtcactcacccagctacctacttacctccttacctacgacggcatagacagcgaggcagttctagctcaaccctaaaccccctctcctactttcgaaaccactcaccattcgaacactcggtggaggaaaaggaaaagactcgccgggcaaaagagactcgactcgactcgggatcatgtcggacgaaccggtgccatcccggtcgtacgtcgtcaaacagggcggtttcaccgatcctatcgtggacgccgtgatgaatctaggaaggactgtggtgagtcgattcagctgaaacggggtgcgagtcatccggtaccgccagacgctcaccgttggaactcggtgtatgcgctcggaacgtcggggaatgtgatgtgctgtgtgtgcgtgtagagcaaggatggggatgctggtgctggtatgtcgatccaaggcgcgtatgatcgcgtcacagcgagaactgaccggtcgaccgcttctcttcctttacatgaacccgacgctcgttcagtcaacaagaaacggactcgcaaagctcaagcggcagagcccgtccagtccaccaaaagcaaccctcacgtcgccccactgacgacggcttcgcagcagatcccgcatcctacctacaccccacctctccttcccaataggtcacaacactcactagcatcctccgctcgaacacccatgcccggttctttccccacttcggggccagcgcctgtccctacccccgctccacctctgggttcgggcacgttgaggtcggtcccaaatccgttcactacgacgatccctcaaaaggggacgggcatgtacctggcgaaagccccagagatgcctcatcgagggtccagtcgatcaggtggactagggacgggcggcgggaatatggtcaaccccgtatcggatatccccgtcctcgatccatcacccgtacctccgatgacgacgacgacgacggctctaccggggatctcgttggtactcccctcttctttcccgaaacctcctccgattcagatgccacccatgcaacaacctcccaagtttgcgcctatccctgaaccgctatgggagcggggcaacgtaggcaagtcggatgccgagaggttcaaggagatggtcctcctcggtacctcccccgggacgaacgggaatggaaacgtcaacgggaacatgggacctggtgatgaagcggcgacggaccggccaaagaggaagaagaagaagagacggagagaggtcatcaacgttcctaccgaagacgtacccctggaaagacctgccgagtctgaactcaccgctcgaccgctcgatacaagggaccaagccgtacgagcgccacagacggtggaagaggacgaggctttgttagagcagcagagacaggatacgaggaggaggcgcaggaggacgatgaggagcgctattgtcgccgaggaaggtgggcaaggagccgtcggatcccgagggttgacgaggggtgcgagtatgaggaggaggaacgtctgggatggtaagtcgactggtccccccgcccttagtctcggtcgctctgtagacgtcgtgtgtggctgatgttctgatttcatgaccagacgtcccggaattcgccaacctcgactcgcccacgatccccgaggccgatgagaccgaagggaatcaagagcaggatcacgatgcgaatcaacaggcgttgcatgaacctcctccaccgccattcccttacccgacaccgagcacggggaggctcccaccggctttcgggagcgtcgtcatcgagggccacgaggggagaagaagtccgcccccgtctttcgaagtcgctacacgaggggacgtcccgaaactttcggaacaacacgcagatgttcagacagagctggatgacgacgaagaagaggtacctccctcgccctcgaccgtctcgaccgtccgacgtgcaaggattcgagacgaaacccctcgtcaacgccgccgacgtgaagaccgcgaacgatgggaacgcgccagagaagagggcaaggacctggatgagctggtcagtagggaaaaggaacggatcgagaggatgcagcattggggtcaaaccggttctgcagcgccgtcgatcttggagcaaggaccggcagcagcgggatcgatcgtggcgccggacgaagacgaccccaggttctctcgagaacaaaagggaaagggcagggcagtgtattacgatgcgacggacctcgccgcggacgaaccgatccctgggcctggactctccagggcatcgtctatgtcgaccaacctggcccgtagcgtcagagaaccgatggacgaagaggacgacttgcccgtcttatccacgacgagaggcaattcgcaggaagtcgagatggaccaaaacggcgaggggtccaagccgtcaggtttcgtcacccaagaactagccctggctggtatcgatctcggaaagattgtcgggatcgacgatgaggagcaagatcagaggacagaagtcccggctttgaccgtggatgtgggtgagacggttcgatcacactcgccctcgacgcccaaggcgcctcaacacgccttgtcgcccgattccaccgtcatcgcacatgttcagaaggaggacaaggaggaacttccgacgagccccaacatgcacggatctaggttcctcgagggcatctctgaaggtcccgacggtcaacccgaggtcgtgcccggcgttctcgaccggccggtgactcgagaagagcccgagaccatctcgccaccaccggcagtgcccgaaaaggacgctgtcgtggtaccaggagagcaagcaccgcagtctccggccattgcgaggaaaaattcgctaccgccgttgttttcaaagcgtcgatcgggtaggaagatatccaacccgtggacgctgttccgccaaacctcgagttcgaataaaaaggccgaggtagacaaagccacagagccttctccgagtccgggagtcgaaaccgaagaggcttcatcccccaaagagactggcttgtccaaatcgccattcttccgagccgctgggcaattcttgaaacccaacctcggcctcgagccgaaaaaggaagaagaaaagaaggaagaagtagaccacgtccgtcaaaagtcggcgccggcggtcgttgcgccggtgatcatgccatcttggaatcgtcaagtctcggcatcgacggtcaagacaacgtcagcatcgactcagcccatggtcgcttacaagcaccctttcaatcgcgctgtcaaaccggcttggatgcagaacgctgcgccgatatggcaagatcccaaggcttatgtcatggacgaatcacgcccgctagaatcgcccgccgaagaacagccaatgtccccactaaaggccaaatcgcccatagaaaagttggaggatcaatgggagatggtgccggaaagcccccaaaaggtcgatcagtcaaccacgctgccacagacgactccctctcacgagccgatgacacagcgcaagcctgccacaggtataccagctcggagacccaccgcgattgcctacccgcctcccctactggcaagcggtaacacccctcaacctgcttcgccgtcttccggatcaagcgaggatgagtctgaaaccacggaggattccgagagcgagactagcagcgacgggtggagcgtgtctgatgcagtcgccagacctcctgcggcttatcgattgttaccccctcgtggtatcccggccaatgtgctgagagctgccaatgaaccgcctccccttcctaggcggaatcgtgagaaccggcccaaacctaacggtcctagacaacgcaccgcgcccccacctctgcctccaagggtgcgtcccgtcgcgactggctccccttcgatcccagctgccgcgctagtggccccgaaacctgctcagaccgaggcgctcaaagcttcggagcctgcactttccgctcaacctgtgacggcggccgaagcgaaggtcgagcccgtcccggtcgtccaaacaatagcaatcgcagcgtcgatgccaaggcgcaaatcggctggcaggacagagacacctgtcaacaactcacaaccaacgactcccggcattccttcgtcaacaagacccaccgcaggtgatcgaaccccttcggccatctcggggtactttaacaagcccgttaccaaggacggcgatcgaccgcgtacacgatcggctggcgctggtttgcggccattaactattgccaacaacatcgacgcgtcgagacaagaagccgcactcagaccaccccctgcgacccaaggtgtacctgttgtctttcctcagtcaaagcctcttcgggttagcggcggtcttcctgctccaactcggccaaaggctacgcatcacgtcaccagtcccgccgagcgcaagcccaaggcgaacgcacggctggccatcaagcctcgatacgatgatcgaccagagcaagagctcaagtcgcaattgtccaaccgaatcaataaatggcgattggctgcgatccgaccggatccaccagagacgtgggaacccgaagacgatgacgaagcggaggtcatcgatcagcaaccctcatcgaccactcttgcgaggtccaagtccatgccgaactttgtaaaggttgaagatggcgatgacgaggtggctgcgagccgtccggttgagcgagaaactgttagacctcaacttatcccatcaccacctcaagaggacaagcccgacaatccgcctgccagggtggaggagtcgcggcaacgcgtcacttcgaatcgcaccaaccgctcgtccaagccccagaccagcgaaaccaggccgacttcgaaacaaggcaacggtcaggttggtcaggctgatccgtctaccgctacccctcccgttaggagtcccgggttggagtacacagatctcgatctcgtggctgcgcaattgcaaggcaccgaccgtgaatacgaggtgagtccctgttctcaaataccgaaacccggaatactttgcttattcatacgccgaatacccagggcatgaacgcgatcacgtcctttgtcggcgaggagattgctcgtggagcatcacctgatagtctttcgaacctgatgctggctcccgtcgaggtcgagagtcggcgaacgacaaaagaaggcaagaccaaactcaagctgaccgctctcggcatccgggtgcacaaatgttcgatatgcctgagccagttccgagcgggggacatcatggcgatgatgccaaagtgcaatcacctcggtcatcagcggtgtgtagtcaactggctctccaaagatgcccgctgcatggtgtgccgagagcccttgtaggaacgtgagaatgtccgcaaaactataaccataccatgatcttccgactcaagacaataaacgccccgatcccgatctggcggtcgcttctttgctcttgcccaaaccggtggcttgtggcggaaagaagagaagatggcgggagctgtttcgccacctttttacgtgatttcatggaaggaacgcgtcgatctcgaagaattaaggtttcgatatgagatcctccaggcgcgtcaacgagagcgaggcaccacttggggtgcctcggacttcatttgtaaacaaatgacttgcatgcttcgttcctcgttgtctccgtcgccctgggtatttccctcggtcggccagctgcaacggtatggataacggatcttggagtcgccaagctgaccgccactgagaaatggtgcctataaggtaaagatctttggtgatatctcgcctcccttccaagcgagatgttgtgaatgtgtcgatcccactcgaacgaaatataaacaacttcttcagagcgaacagtctgcgaaacctcggctggcccgtaatcccttctggcaagggctttccatcttcctcgattcgacttactacacaccatgttcggcaccctccagtttcccgcggcaatcgcatccacgctccttttagcttttacagttcaggctctaccaaaagtccatcgtctcgaggccagagctactatcgacctccctaccggctggaccgatgtcggatgtgttcaagactactctgcgcgtatcctcactggatacgtgacctcgagcagtaccatgactccgcgactttgcgcaaacacctgccgtggtcttggttttgtgagcattggagcggatttgtttccgggtcgcggttgtcacctgaccacgatcgacgttcatctatgcaggaatggtccggtacccaatatagtagccagtgctattgtggggacaccgtcggtaagtggctcggccgttgttgacctgcagcgcgcaaccttactgacgcgacgggttcacagcgagacaagacgccacgaccggttgcaactcgttgtgctccggcgacaaggcgcaaacatgtggaggtagttggaagatgaacttgtacaggcatagctcggcagctactaccagtccggctcctgtccaatccagttccaccgtcaaaaccccaacctcgactgtcaagccgtcgactacctctaccacaatcaagactagcaccacggtcaagccctcaaccacgtcagctgcagtgcagtccagcacatccgttaagccttcgaccacatccgtcaagccttcgaccacgtcggctatagtgcagccaagcacttccgcgaagccatcgaccacatcgaccgttacccagcctagcacgactgcacgatcgtctacctccacggccgcgcccgtatcgtcgggtgcgcctgctgccaccgcccaggttattgttccccgagtcgctagtagcagtagtgagaagaaggtctgggctcagtaagcacaaccgaccgtaggcccaagcatgaccggtcaagctgacacttgaacatccagtcacatggtcggcaacacataccccttcacctatgacacctgggttagcgacatcaaccgagccaagagtgcgggaatcgacggatttgcattaaacgtcggacccgacgagtggcagccctcgagggtagccgatgcgtaccgcgcagccgccgcccttggattcaaggtgagtcacctacgccgcttccagtcaagtggatacccttaaccttgattcgtccttatagatgttcttgagctttgacatgtcgacatttaactgtgttaccaccgaacgattgtcttacttccaaacttacctcacgcaatatctgtcgcacccggccgcaggaacttacaatggcaaagcaattctcagcactttcggcggagagtggtgcacttggggtcagggctccggtgtggatgccgttaacaagggttggggaattgtcatgggcagactcaggacctcgacctactttatgccagcttatactatgggcgatgggcccagtaagccattttctcgctcggattagtagctgacgcaactgacgcgttttcgctcatctccagggagtctgagccaatacgacatcgatgccgagatcaacgtgagtcatggtttctgcgttttcagatgagacccgggtttctgatcctcaaacgttttgtagtggggctgtacgtgcacgtgcaaccgctcttgtctgaaatatgacgactgatgcgactggatattatttagctgcttggccgaacagtaacacagacttgacccttgacaacgacaacttctggcttggctacctccccaacaaatacgttgctaccgtctctccttcgttcttcactcacttcggctacaaggtcagtctcactgtctgcgggtagtcaacagttcttgactgagtaatggctgttttgtagaattgggtctacagaagcgacgacttcctcttctcgcaacggtgggaaatgttgctgtctgtccgagacaagattagccaggtcgagatcgtcagttggaacgacgtgagtagctttcggttccgctaccatcgagcatgtccctaaaggcttgaaacccaaagtacggcgagtcccactacatcagcgtcgttaacggcgatcaaccccccgagagcaaggtttggaccatgaacccagacagtaggtctgcatggtatacgactcttgtcatttccgatctgacctgatccgcatcaatagttgaccacaccccgtacctgagcttgcaagccttctattccgtcgcatggaagagcggatcgatacctgccattactcaagacaaggtctggttgactgcgcgaccgcataccaaggctgcaattggtactgcggattccgtcccccggcccgacggatgggacttggtgagtgctctcatcggatctgatgacaccactggcactgatgcttgccatcatggcttccccgtattcgcagcaagacgacgagttctacgctcaggtccacctcaaagctgacgctaacatcgtcgtctctactaactcggtcagcaagacctttgctggcaaggctggtatcaatcgtgtttccatgccgctccaagtgggaagtggtatccgggtccaggtggtaagtgatgtcttgaaggtaccgaccgcgtttgaagcccttcctgacattccgtttcgctccatcgcttgtaggtccgcggaaccacgaccgtcattaacttggctccttcctttaccttcgtcaataaccccgttaaaatcagtcatagtgagtcgaaagattcgtaccgctcctcgactgccccgcttaaccggaatttcgtccgcagattaccttatctggcagagctagacatctactacatgcaggacatgcgctgtatcatcaagtagcaatatttagcatttttttctcgccgagatagatggcgccgtgtatcatctccacatttcgatattgttcgattttcggttggtatttcgctatgacattcagtaccgcttctgcctcgctctgtgcgatgtatcaggttttggagtctcgtgtggtacaacgggagtcgaatctgaaacgcacaggtgtagatccaagtactgtagttcaagacgcccaagacttagaagcaaaggaacctcgatatagggaggaaaaaacctcaccttggagtctgacgcgtgaacactctggaggacgagcctgaaacgcgcgcgccgctgttcctctttcgggaccgacgcttgtttgttgtttccatcaaggggaatcaccctcctttcgcgctcctttgggtcctttgatccgtgagaaatctcgtcatcatcatctcaatcttcatcaatcttgatcacttcttcatcacgatctcgtccgttttgttgtctttgatgagttcgggtcgcgggtcggctgttctgggggtactcaattacatcgtctcatgtaaatatacgcgaccgagtacgccgatacacgaagcctagttgcatatacaggtatgaatctagcagaattatatccagcctcactgtaattgacaacaacttagcgagacctatcagtcgggttcgccccatgtcatctcagcacggaacccctcaagcaggaccccaggctctacctcaagatccctatcccgtcaccatcgccaatcttttacacgcctctcagcgcacccgatatgatctgtttcctcgaaatgatcaagatccgaactcattaaggatccagggtcagcccttttactccaccttgcctcagggaataccatccccaccggattcaaacgccccctctaatccggccgaatcgcaccaggacgagtacctcctcgcaccacactatctctctttcaccactcccgtcgagcactacgccgtctggtcgactcgcatgacgatcgctctcacagcagcaggcctcctcgcacacgtcagccatggcttgcagcaggtcttacccgaagtagaattcctagtgtgggttcaccgggacgaacaagcgaagaggatgatcatgagcaagctcggggacgatgctctcaataaaatgctagagacgaggaggaaggcgagagaaatattgatgggaactggaaaaagggaatctgccttcgggctttgggtctacctttcccgagcgtatggcggtgaggggaggaccgagtagaaacggcggatgcgtacccctgagcctcagagtaagtaatgccaatcgatacgcaatggcaggcttttctgattggccgcacctgtagaccaggatataggaaacgcttcagctgtagatccgtgatccgtcaccggtttcgtataccctcctatcagaacgctcacgcatcctgcgcgtttccgacgagcaaggaattccattgacatcgatggcttctgcgatcctgtacgaagactcctacacacacgtcatatgcacaactcatctagtagatgtcacctgtaatcgttaccgggacctcgggatatcagagtcactcctgcagatccttcttgagcagagcaacagtgacgggttgaagcttagagacagcctcttcgtcgcaaaagattgtgacatctccgtggatctgaagagctgatgcgggacaaaggtggctcagaccactttcgatggcgttcttcatcgcctgagctttcttgtccccggtgacgatgaggactgtgggcatggcatcagtcgagattctgagggttgcgtgtcgaaagaaaaggcataccaatcttcttcgctgcgagaatggtagccaatccaacgctcagggcttgactgggtattttgacatcttcaccgaagaacctggactgttgcgataatggaatggttcacgcctgtcaacggagtccctgcattcctcccaatatgcgactcacgttggcacaacgagtagattcgttcaagtcgatcagccgcgtaacactaccgaatccgcttccaatttcgttgaatgcaaggtgtccattctgacccatgccgccgaggaaaaggtcgatacctccgtaagaattgattttcgcctcgtatgcttgacattcatcgtccgggctggcggtgtcaccgtcaagaaggttgatgttctcggccggaacatcgactgagggtgcgacacgtcaacatctcatacgtgtatcaggtccggactctgactttaccgtgatcaaagactggaatcgagcaaatcaattatcacttggacaacatacgacgaggcttcccgctgtcacctacaattttggcgcatgtagtaggcgtagctcgaggcatcatgagcctgcattctccagtattcatccatgttgaaagttacaacattctgatcccccgaggcgttttagtatgagaggtctttttgtattttaaacactgaccttgaaactgatctcctccgctctgtaggcttttactagctcagcataaattgccagaggtgacccacctgtgggtagtcctaacacgaaaggccgctgtttggtctcgttgtgctttttgatagcgtcgatgatcaatttggcggcacggcgacaggcatggtccgaattgggcctatgtctctccaaaaatgcgatcagtatttggctgcacgcaggggaagatttgatacctgcttgatgacaaggtacatgttcggtagacgatgggtcggttctgtgtgagattgtgacctatagcatcgggcagctggaggcctcgagggaaaggaaggattatcggttcgccccctttatggtaaaccgcgactccgccgctagcttggggtcgcaggcccagcgagaatgtcgcaacgttcttcctttgtgatgtcgtgattgaaggagaagcttcgttatgtcccagttgggcatggaggtctccgtcgtgcttcttcacagcccatgtatatggcagaagagctggcgagctcgaattgtattacccggtcaggggatactcgttcttttccagcttacattacactgtctacaaaccatgcaagatagttccctcccgtctgaccaccatttggtgaaatttaccaattgctatctcgtccagccggatgatggcaatttgaccggttgtgccgccgcgctctgggtagatcgtcgatcgggaaccatcgcgcacatgtcgttagaagatcaaagcgtaggtatttctttcgagacaggcgcggctgaggatcaggtttataccagggcagcgcttgcatcggctccaacgatcgacctggaaggtcatatcctggcgccagggatgatcgatatccagatcaatggcgcttacggagtcgatttctcgcattggcctggttcagaagcggactacgtgtgagccgtggaaagggtgtcgaccagtctgctcgagacgggtgtcacagcgtacttgcctaccatcatcgtaagggtagtgtctgcgtctggggaagtcaactgtcactgattgacgggtccgacccagtcgcaaacgcctgacatgtaccgccaaatcatcccgacactccatcgccttgccatcaattctaaaggtcctaaagagcgggagagctgtcaagtcatcggctaccatcttgaaggccctttcttgtcccctgcaaagatcggctgtcatcccctggataacgctaaaacagcctgtgagggttggcgttccttcatacagacgtatagtgaggctatcattgagataacggaggaaagggaactagccaagttggtcaccattgcgccagaggtaatgggagtgatggatgcggtcccgcgattgattgaagaaggattctcggtcagcataggtcattcgtaggtttcgcggcagaatctgttcaaatcatcgcgcttacttagcacgatatcttcgtagtgaagccaaaactcgtcaagcagtcgaagcagtcaaccttggcgcatctctggttacgcatctatacaatgccatgcctggatttcgtaagtataagttgaatgtgatgactagcggcactgataattcgagctgtggaaatccagatcatcgagagcctggtatcattggcctgcttggcgttgctcccggcagttgtgacctcgaacctaccggtgtaacccatccctcgcaaaccgtcaagtccgccatgtctactcctgtcacgtccaaacgcctcgaaaagaccgaccgcttcaccatacaccattctcagcaggcggtcgtgcagaagactgatgccggtttgtcgaatcaagcatcgaacgggtttcagagacctttctggagctgcatcgtcgacggtctacatgtgcatcctttcgctgtcaattttgcgtaccaggcgcatccagaaggttgtgtcctggtgactgatggtaagtccacctgtgcttgaccgatttcgaggctgatacttatactgctcgacccagccgtctcctggatggattcgaagcttccgaatggtatctacccttggcgatcgcaagaccatacagtcaccaagaaaggggactccgttaccttgaccgacaccgacacgctcgccggggcagccgtaccgctggacaaatgcgttcgaaaccttgctcagttctgcggtatcccgttatccaaagccattcattgtgcaacttctaaccccgcgagatgtctaggcggaaagattgcccggtcgaagggcgcgctcagagtcggattcgatgccgacctgacagtgtggaacaaggatactggagagatgttgtcgacctggatagctggaaaccaggtatacggccagcccaagctgcaacggccaacatgatacgtgacaccaggcccgagaaggacgatccgatagattgcatgtcaggaatcgaactgtatgtggtaaataggatacaattgtcaaagtcgtcaaaggtcgtttcacttatcgtgaccggatcaaagctcctccctcgttccgactgccttcagtcgttgatctcgctgtgcctccgcgattttgagagtcctcttgcgtttccttgtcgcctcccatgctttccattcccgtacctcttgcttgacggcctgctccttcctgcgcatcccgaggtccaatacgaacccaacgcccttcacccgcaaatcgtaccgcgaaggcaattgcgaaggattaatcatgtaggcgtaccacggcaaacgagggtgtgcgacctgctcatctccgtacacctcgctcggggcttcgacgtaatcgtccgaatagtcggcatggtagtttgttgttggctcaggtgcggcaggtggttcgggatctgcgacgtgtacagcagtcgctggatacgcggatttctcctcgagcccggaacttccgccttctaagaaagtggccttcgaccagtcgaaccatcttcgcctgggctgcggggtggcctttgctgtagcaacagacgaagaaacgtcgggagcggccggttcgataggctcgacttcttcggttcgggaagcgtgaggattctgctcttgtatgacagccttgatggcagatgacgttctcgagcttcctttcttctcgctgacaggagtgtccagtagtcggtatccttccaactttggccacagaagccgtccgtagttgaggtcgacccagctcctgttcgctacaggcaccgcgtacaagaagctcgtctcgttgcctttccatgcttgctctagaagagtcgaattctcgtccacgatgtatggccgggtcgcggacggtcgatacgggtcctctgggaaagacagcgatagataggaaggcgtcgaaacggcgaaaaagaagatcacgagctacgaaaagatcaacgaggcagggtcagcattcttgatatctgggtatgtgaaaaaaaaaaccgtaggtagacgtactacgcatgtgcaataaaggcaaggtctcaatttaagccacattgccgtgataaaggtgaacatgaagagtggtgaggccgcggggaacggcaagattatgagaaacaggagaaaattcctgagacacatcatcctgggcgaagtttattctccaataaggaagtagctagatagatgtggtctggaacggccctgttttgtacttccgacgaacagaaggtcaggttgatgaaccagatgaaagagatctcagccgaagagtgatggctcatcactggcttggaccgagattataaaaaacgcatattcgaaatgtggagacaatcaattacggtagatcaacgagagcgctgccaagttccaaaagtagtatacgccgacggcaccggttgtatttacaacttttaaccgtttagtattctacgtcaaccaagtcaccaattatggcagagaatacaaatcgtgcactttcgagaccaggcctgtctcaaggctctgtcatcgcaagcggagagctgtagtagctgtccttcttgcgcgtctcgacggccgttccatcttcatcgacgccgatgctatcaatccgtaccgtcctagcccgcgcaccaagtatatcatcccaatatttctgggcttcgatatcatcgagcttggactcggcggcggactcggcaccggtagtttccgttctacttgcaaccgttatgagctgattaaaaggctcagattcgctatccagtcgaccgcggatatccggcctgtccttgtaggtactagtagggctgagcggggaatctttgtaacgggcaggagtcggcgtcgtaggcaaattgatatagtcgagctggtaagtgccgtcgtattccgatttctgttctctcccagaggagcaggtaccgtgtgaggagtattgcgacggtttgcctgatccagatgagccggttctatattccaagctactcgtcaacgaacaactacatgcgatgggtaggctgcagaaacgcgacttacgccttgcttgtcaaatggctcatgtcgactcggtccggatccccgataaaaggcaaaaatttgctgaggacccgcttataaaacctggtcgtttcggtacctatgacgcagagataggaagtaagaaaagatgtattatatcttctacacacagttacttaccggtagcaaagcagaaaaagaagacgatactacaagcaaccacggtgtaccattgcaggtacatcgtgcgtagcgtcttccccgtgaccatctctgtgggaatgtgtccgatggtcttcaagtcgatatgcttgtcctcgcggttttgacgattgaatggctgtggtctcgcttggtatgatttcatgttgaagaacgctcggagactggtgaatacgtgcagcaaactttagtgatcttctaccgcaagagatttccttctccaccgtgatgcctacagacaggtaccgagctcagcaatagaaagacagtaaagacggatgaactgttctttcgacgtttgattgtcgctcgagaccatcgacagcatatttgccctgcgaaggtagatgtttaccaaagccatcactgtggaacgccacgacttagctccaagcataatcgcctgtatcagggtgatgactgaccagtgtagactaaagcacccacggcgattccgatagggacgattgccatccaagtgacaccccaagcatcccaatacgtactcggcactggtccgaatccttgggcgatccagtatctcctgtccatctgcgtcaggtgtaccaatacacccaggataggtgccaggaagcacaatcccaggtcgatgatcttgtttcggcgtttcagcgagacatcgtataataccgaacgcgtgcggagtgaggtgagggcttcgagctgacgcgcgagcaacaagtgcgacagcggcaaaccaaagttgtagccaacgatgatggcgcagcctggtgccgataacgttttagtcagatgagaccattaaaaggtataatcatatggtgaaactcacagatgtctccgtaaacggtcgctttcctctcatttgaggagttccagatcagggctattgaccgcatcaatcaatcagtcggaccacggtcagctgctcagacccaatttgactcacgattgatgatgtggacggcgttgagcatcaacatccaaaacgacatggacaatgtcgcgatgttcctgattcgcagatgccagggtactacatagagcaccaccaagaacgatataagagaaggtatgaacagttccgggtaattcagcgtcatgatttcgagtgaatccgggtatgcgattggaattagggaccgatgacaaaaccttacggaaagagagcccctcatctacgatcgtgcttttccaggccggcactaggctggtcatatatatccatgtcgggcaccacctatttagctactgaagtcgccccatgccgacctgctctcaggtgatcgagtgatcgattgattggcgatgatgagcaatccctttaccggctggactggcaggtttcctgtggaaggatcacaaaggtccttccgagtgattccacgatctttcgaaaaggcgcggaaggatcgtccgtgtgatcgcggcaaagaacgcatgaataggcgcggatcaaaccggtcgcgcgtttcatcacgtctcgtgagagcgatcacaggatcctcggtcgacaaagtgaatcctacatgaggggccgcatggacgtccgggtgggtcgactccactgttcggagcaagagttgccgagactcggcttgcagcttgcagatgatcttccgatcgaaaggctcgtcacattccaaaccttgacgatcaattctcatcatatgcgttgcgtgctggaagaaaggcataccggtaggtattgcccgcggtagatctctagcaccatgtggataggaccacgttgagcatgggagcgagcctataagctcgaaatcgtaaaatgagggtgacaaccatcaggaccgccgatgggcaagctggatcatttcacttgcctcatcacgctcggaaaagcgggagacacggtgtggaggtcctctcaggcgcgatcaaccgcgagacgcgagacgtgaccgtccatcattctcgtattgaccgccgaaaggctcggtctcggcgattttccgcggcccaatcgacggacgctgtagactttcccaagacgtgcaaaagctaatcaaaaaggcttgtcacgagaaagaaaccatgctatcctcatcacgccctagtacaaaacgatacgcccgctcaagtcccggtctattccgagcccttgaccttgtaagtacgcctgtacatcgagtcgatcttttcgaggtaataagcaccctcccaaaggtcgtcgagcgatccgcgaggggtgtagtcgacggcgttgtggttttcctctcggagctacaaggttcaaagacagtcagccgtcacaagtcggggacagcacacgcgtcctctcgatcggcgtgatctcaccttcatggccgagacgtattcggtgcaagggacgaccttcatcgattccagcctctccttgagctgaatcttgtcggacatctccttggtgcttccagctactcgtagggcaaagaaggaagcggcacatccggatccgtaagagaacattcctactcgctttccttgctacgaagcgagaccaaggcgattcgtgagcggccagcacctctgcatgctgggggatggacacaactcaccaagtcgtccgaggcgacgttgctcaacaaactagccaaacctccgtacaaactggcggtgtacatgtttccgcacctcttgcagcagtccataccaggctcgaccgatttcgagtagtgcgccttggcgactccgagcatggtcttttcgaccgtcttgtcggtgagcgacttgaaggggtcgacctggaggagttcctggggaacgtcggcgaatcgcgacgatgaagggttgttaacgaagtcctgtgggagcggcgttacgagtccggcaatcagcttctagacattggattcgtttcgctctcgttgtacttgactcacgttgtagaacattctggcgtgacccttctgaacgagctttccatagggactgacgaaccgcatcgactcgatcagcttcgtgccatacattttccttcgcgagaaaaacaccgactcacgagtggaacaagatgtagtcgaagctctcggcctcgacaccgaccttgacggccttgttaccgttctcctcgccattgacgtgaccgttggtaccgtcatgagcgtgtccgttgacggcctggtcggcggagtatcgcttggtgtatttggtcttgtaggtcgagtaggcggcgtccagagctccgaggtacgaggtcaaggtgaggggaccgtcgacggtaggctacgaagcggcgggtttgaggtgatgagcgtgggaaagtttcgatgatgtttcacagtggcacatacgtattcagcggcaagatcgggcttgaagaagtcccaagcgttggtcatgtaagttccatgaacggctgagagtcaaatttcgaccacactagatcagtatgggtgcttcttatcgtcaggcgaacctcgctgcgactcacgctcgaggaccaaaggagcgtcgggtccgaccaaacaggcgaaagcaccggctccaccgacgggcctagcggatccctcggcgtagatggcgatatctccagcaaagacgatggcgttccttccgtcccagctctcgctctggatccagttgacggcgttgaagagcgcggcggtacctccgtaacaggcgttcttgctgtcgattccctcgatatcgtggttacccgaagcggcaaagaggtccatgaggacggtctttacggatttagacttgtcaatgatcgtctcggttccaacgtccaaccttccgatcgaagccgggtcgatcgagtatttcttcaggagcgaagagacggcggagagggcgaacgagttgatgtcttctcggtcgtcggtgcaagccatgtacttttggccgaaaccgatggtgtacttgcccttggcgacgccatcaaagtcctcgagctcgtcctccgagatgcactgtaagaagagagtcgcatatcagtcccggtccagtgtcgatcgtcgactgatcgcaacaagcgtggggagctcatgcggactcgtgcgatccgaccggtcatcaacttaccctcttggggaagtacatctcgatagccttgataccgacgttctggggtcgggtggtagtggaagtcattttggttatgtctgtgtggtagtcttgtatgtttgtgtgacgtgtgggggtcgtttgatgagtcgatgagaggtcggtatgtagagtgtcgtaagtcgttttttttttttcctaagtgagggtatttatgccaatgatgatattggaaaaccagaaatgaagatgaagaggatgaagaggtcgaagacgatggtacgagaaagacgaccaaggtgatgtgatggctgatcggtcgatctgggtggagaggtgagctacgaggatgagcttggggtggtcgttgggggaaattccgtcgagaggatggatggatgcaatcgttgtggtcgtacgagagagaaagaaaacaatcaatccgcggcacaacagggagaggaacagggaaggagagagaaatgggttgtatccgcatcattacggcatcacgcgccgaagacgcctctcgggggcttttcagtaaatccccccctttgttctcccggctcgtggcctttggaaagaggggtcaaagcgtctcgtcgctttcacgttacagacacgtcccatacagacacgcaaggagcacaactgcgaccaacgaccagctcggtttacttcgtcccactatgatagcgtcaagatgtgagtcgagtcgcaagatagagggatagtttgtacgaccagactcactcgcgacctcgttcgacccgttcagactagccggtaaccccgtcgttattcccatcgcgttgcctccatacgccgtcgtgctagacccgatcaacgaggtcaagaacgagtcattcgcagtcaattccgtcactgcactagctctcgtcgtggtattcgcattcgtcgtgctaccgttaggactcgcatagaggtcgctcaacgccggattgagggcgagggtcaagcgagtgtacctgtccgtaaaagcaatatcgtccttttcagctgcaatttctgcgtgtaatcgacatcgcatcttccttcgctggatcacagaaggtagatcggactcacaatatgttctgtacgaccgagtcaagtgtcataccctccaaacccttgacgccgaaatcttggccccaggcccaggctgcgggtttcatctctgcagaactctcgaacgatttcaaagcttgcgcattatcagcgctctgtcgcgtgtgtaggagaggtactttgcacgtctcagtaaattgatcaggtgatgctcagagttcatgaggggactgacgatcgattcccaagctcgtaagacatcggctatcgttgatccgtcggctttgatcccgtccgcaaacgttaattcatctttcccaacatccgccgcgagcatgttgatcatcagcaccatcccagagtgacaagaatcctgatcggtggatcctagaaggatgggttgagaggaaggactcgagggaatggtgaacggtcgagaggcgtcgaatgtggatgtagcagaaacgagcggatttgtggtggtgtcggtccccttaggatcgtcgtctaagggttgacaatcttgacccaacttcatccgattcaatcggaccatcacatcgccctctttcgcctcgaggacgaaagggatcagtttccttatccctgcagaagggttgatgatgaccgtgtgcgtttttgttcctgtggcagtcgacgtggtattcgcaggcgcagtcgaacctgacatgccgcccgtgacggtacccgccccggcggtagtggtcgtcttggtcagccctgctgggttcgccgtgaggacggtctctgcggccacagagccagatcgagtgatcgtcatcgcctttaccgatcctgtcgcggtgaggactacggtagaagggatcctagcgatggaggaagctccgggaggtacgatggtcgtctcgacaggtccaggtgggtgctgttcagtcgtcgtctggcttgaatctgaagtaggttcaggaggagcggcagggctcgaagacggctccgggggagggggagcagggtctgaagaagaatcggtggacgtttgatcgaccgccatagaggtcgccgcgtcctcagtcacaggagcagctagcgagtctgacattgaactcgttgcggccggatctgtggaggaagtaggaccttcactaatcgtggtacttccagccagtcctgagctcgctcccgaatctgtttcttgctccatcgtggtgctcgagcctgactcctgggtactcgcagtgctcaccgtgaccgtctcggccgctcccgaggaggttgcaccatccgtctcactagtcgaaatttcagaggtaggagtcgcgtaagttgactctggaagagagggcagggtgacatcctccagcaacttgttcttcaatctcgatgacgactcggccatggaggcagaggcggagaaagctgtctcgatggcggaggttgttcctgagattccgctctatatcgcggacgaggtggagtgaaaacattagtataagggtcagggggctcgacatgatgaccattccccttccagaatggccaatgttagactcacagaaggttcttccttcccttcttgtcgtctcaccagccccatctctctcgccctctcgttccccttgatgcccctcatctccaacttggactgcatttcaaagggttcctctccacgctgatccgccgtcactataccgactagcagaaaaactactaccagggctttgccatggaagacccaggtcgtgttcaggcttaggccgaggaaacgcatggtgtgacttcgagtgcggtattcgattctttgagtgtgagacccttctgttgagccgggtgaaaggtgactgggacctgcccgtcgttggagtaggactgatgaacagagcgtagaggaacaaggcagacgaaaggaaagagaactagaagggatacgaagtcgtctgagacaaaagtgaattcgatcttgtctacccaaagctacgacattgccatcaatttgttgctcacgaggacgatagtccgtgatcgatagctcgagttcgtatgtcgaccgttacaggcgatatctggtgtctagtccatgttctttgtcgttgtgctatcgtcgagttggccgaaacgttacgtcgtacctttcaaggacgtcctccttccttttttcttcctgttcccgtccacagcggacgaagggacagacggggacagacgggactggctgtgctcgcagacatcctttcgttcctttagcgtgactcatacatactgttcaccttatgtttggtcgtcggtttggtacaaattgagcgatacaggtggtggtcgtcgtcgtcgtttcatcgctccaaatgacctcggcctattcctcggtgtttcatcttttctccatccatcaccccattccacgttgagtttttatcacgcggaacgaacaaagtcgggtcgcgacgaccggaccggcgttttcggaggccgacgtctcgaaatcttggtgaccggcgtgaaaccgatcatggcggatgaggacgaacggacatgagctttcgcagcgacacagctgcgactcatggctggtacatggcagagggggttgttcggtgttgagacggtatttcggctgaattcaaaagtccgatgttccctgtagtctcgaccgaaagtccggtgacttttggaaaggggtgacgccggggggtagggctggaagggaagacgcggaacaacggccgcgtgcagcaccttgacgtaactctgttgtgaatcgcttacacccagccgcgtcggctgatcgatggctcatcgaatggctgttgttgatccttttcaccttggcttttactcgcttgtcttgcgggacccgtggctgggtgcgtggtcatcgcacaattgtatggccaaggtacctcgtcgtcgttgtcgctggccggacttcggcgatgaccctatgcgggggcggggacggggcgaggagcggaccaagttccgcgcggaccaacttccgctcttcactcacctttctccgatcgaccgtggaccgagacgaccatcctcgtcgctcgttgaccaagccatgtcacggtccttgagtatatatactcacagctcataatgcagtcaaggtcatgcaatcatcgctcttccctgtctcttctaccaacggcctgctagccaaaccataataccaaaacaccttctacaaaatcagcaacaacatggtcggactctcttccctccttggcggatcgaaatcggactcgaaagattttgacgtagagaccatcctctctaccttgtccttgggcgaaaagatctctctcctcggaggaaaggtgagttggcgaggtcttccttgaaccacactctggactggatcgctgaccttgctgctactcgattcccactgacaggacttttggcacacggtcgatatccccgagaaatccatcccttccgtccgagtatccgacggtcccaacggtgtccgaggtatccaattcttcaacgggaccccttccaactgttttccctgtgctaccggtctcggttcctcgtttgacgtcgagctggcccgtgaggtagggaaacaactcggggatgaatgcaaggccaagggagcgcacgtcttgctcggacccacgatcaacatccagaggagccctctcggtggacgtgggttcgagagttattccgaggatcctcttttgagcgggaagatggccagcgggtacgtccagggagttcagggggagggcgtcgctgcgtgtctcaagcactttgtgagtctcgacgatatttcgatttccccggtatcggtacgacgactgaattgccctcgatcggttgatacgtgcaggtgggtaacgagcaagagtttgagaggttttccaacgattcgatcatccccgatcgagccctccgtgagatctacctcgagcctttcaggatcgctaccaaagagtccaagccttggtgttacatgtaagtaatgtcccgtcgctcaactttcctatacaacttcgctctcgagtagaacgatgctgaacatacttgtactccaccaggtcctcgtacaacaaggtcaacggtacccacgtctccgagtcgaaagacctgttggacgacatcctgcgtaaagaatggggctgggaaggaatgatcatgtccgactggactggtgtatactcgtccgacatcagtgtcaaggccggtttggacctcgagatgccgtgagtcaccccccggtgtgatgcaaaagacactggagaaccggtgactgacgaccgcgacgactcgaacacagtggtcctcccgtttaccgaggtgctcagaccgctcgagacgttttcagcgggaagttgcaggagcaccacatcgacgaccgagtccgacaagtcctcaagctcgtcaagcgggccatcgactcgggaatcccctttggagtcgaagagtcgttgatcgacaacgatcagacccgagccctcttgcgtaaagctgccgccaacgccatcgtcctcttgaagaacgacaagcagatcttgcccatcaagcaggctcaaaagattgccgtcatcggatccaacgcacgagtggccgtcgcttccggtggtggttccgccgcgatgttgtcgagttacaccgtcagccccctcgaaggtatcactaccgccgccaaggagatcggagccgaggtcgatttcgccatcggatcggcttcttacctctacctgcccgcagcgaccaagctcttgtcccacccgagcggcaagggtggtcccaaggggaccgatgtcgctcagatggagttctggttggaggaaccctcgtccgacttcaagtcgagcgacaaggccggcgtcaagatctcggccaagcctgaccatgccgtcggcaccaacacggccaacgctttcatgatggacggtctccccgcgaccatcgccaagggcgaaccctacatccggtacacgtccaactttagcccggaccagtcgggcgattggactttcgctctcggatcgatgggcgagtccaacttgtacatcgacggtaagcttgtcgtcgagaacagctcgagctggcaacccggtgagatgtggttcaacatgggatccgtcgaacgtcgcggggtcgtccagggtctcgaggccggtaaacagtactcgctcgaggtcaggtgttggttcaagaaggacctccgagggtcgcctttcaagtcggccggtgccatccgaatcggagctctgcccgtcgtcgacgacgctcaggccattgccgatgccgtcaagatcgctcagcaggccgataccacgatcgtggtcgtcggtttgaacgaggactttgagtccgagggttatgacaggaagcacatggagtgagtgtcgccgcagtgttttctcgaactgccgatcccgccatactgacccgtcttcccctcagccttcccggaacctcgaacaagctcgtctcggccgtcctcgccgtggcgcccaacgccatcatcgtcaaccagtccggaaccccggtcaccatgccttgggtcgaccaggcttcgactttggtccaggcattctacggtggaaacgatgtcggtaacggtctcgccgacgtcttgttcggcaagctcaacccttcgagcaagctcgccttgtccttcccgtgagtggcttgtttggctcgctagacgtttcacatgatggccccatatactgacaattgtcctgcgtcattgtccgtagtaaacgactggccgactcgccctccgatgtcggattcggaatcacctcggcgtcgtatggcaagacgtactaccaggaaaacatctttgtcggctaccgacactttgagaagtctcagaccgagaccctcttccccttcggatacggtctctcctacaccacctttgacttttccgacatctccgcctcgtccgtctcggccgagggggatttcgaagtctctttcaaggtcaagaacacgggcaagattgccggaagggaggtcgctcaggtctacatccgcgacgtcaagagcagcctcggccgaccggtcaaggagttgaaggcctttgaaaaggttactctcgaggccggagaggagaagacggtcacagtcaagttggacaaggacgccctcaagttctgggacgatagccgaaactactggaaggccgaggccggcgagttcgaggtcttggtcggaaactcttccgacaacgtgcccctcaaggctagcgtcaagctcgagaaggacttgacctggttgggattgtagacactgtctcctgcgagaacaagtaggtaacacagacaaacaaaaggttgtatagcatagaagccatgccagatagagcattagtgaatccttcctgcaaccatcggtctgggtcaggtctagactacctatcgttcagacgtcaaattcataggccagaaggtcgtctcttcgtccgaaagtaattcgtatggaagagctcgtggctcaagcgcaccgtacaaatgggataacatgtgtaggccttgttctcacataccttggctattgcgattccggcatgacttgtttgctcatgcctgtagttcatgtactgatgatcgtgtgaaaacacgctagagttctggcctgaatccccatggtgacatgttcggaggaccaagcgattggggccaggtctgaaccgattcgtcaaaggtcaacaagagttgcggcacatttcgtcgcggcgctgcgggacggctccgacgactaaatgatccgccagagccaccccgggtgaaccttgcaagctcagcccgttggtcgtatctggtcatcacaggtgcaaccgggcgaacgagaacctgggcgaaggacaagacccggccatgcgctcggaaagggatgatgaatgatggtaatacacaatgatacttttccgtcttggccgcgatttcgtttcgctcactacctcttctgtcggtcgtaaaagagacacaaaaaacacacaccgcattcgtacacgcccttgtcctctgtcgagattcgcatcgacccttccttccgtcgatcaggcgcgaggggtcactgggcaacatgccagagggggggttcgatcaagccgagtggagctgggctgatcttctatacgacctctccgaccccctctcaacctgaccggcctctcccccttccttcctcgcagactccatcaccgtctcgtctcgtctggcatcttcacgtcccctcgggccttcacatccccccggtcctgctggctgaacgggctgctcttacataggagccatacccgccgcctgagcctgagcttgcatctcctcgggcgtcatcgaggacgactcgatcatgactcccatcccgatctttgaagttccctgcaaagtcatcaaaggacaatcaagccaaataccatcagtcatcatcatcggagtcgggcttttcacacatctttatgaaagagggcgtgggactgaccttgagatggtcgatctctcctccgacgaggaaagcgaacgccggggtgaacctctgttcgagcaacatgccgactttaccctgactatccacctgacccctgaaagtggccatcctgaactcgtacttggcgcctagggtggccgtagcctccctcttacccgggcccatggggctggccggggtgttcaggatctggaggtccaggccgacgtctactgccggggagagtttctggtaatacgtcgattggaggatcccttggggttggagttggaccgtggcgatccactggttgagcgagttcaaaccgagcgaggtgggcgaggagacgggcacggcggacccgggggcggggagggaagtgagtttggcgaggtagctggtcgaggtctcgaggatctggggttgagggtgttggatcaaggtctcgaacccgagggcgagacgaggggagaccgagtgaagcagggagaccatgtggatcccggtgaggtcggtcggggaagggttgatggttcgcaggttgagcgagtagtgaggacccatgtggtcgtgctcgatctggatcatcgaatggcccggttgacccgacaactaggagatgtccggaaaaacaaagaggaaccccgacgctgatgagcaagaccgtcccttccccgcgctcgatcgcccgagaaaccacgtccgactcacctgggcctgcatcttggtcgtgtcattcgcgctccaagactggttagccctcgccgtgaccgaaccggtatgatcgacacctccttgtaacagcgtattgttatcggcaaagacggctccaaagttgtaactcgggggtgcggtggcgctggccaggctgaacgagtgggtcacttggaacgcgggggagagggagagaccttttgtcaggtcggctcgggcgccatcaaagaggaagttggtgaggtgggtctctgtgagtgagaggtgagcggggtcgagtcggggcgaggttcgtttgagatacaagcgatcgagagacgggatggcaaacgtcagctttgaagtgtcggctagcgtcacccagacgctcatgaccatgacgtacgcttgatctccctggtcaagttctcgacggtgccaggctggtacaagccgaacccttccttccacttttcaaactttgagtacgtgttggcgatcgggttggtcaacggtcggtgtatcgagtgaagagcgtcgaggtaaggggtgaatgccgagggtgcgggagaagggttcgtcgagctggaaatgatcttttcgtccatcgtgggtacggcggcggggttgtacgccgggtaagtcggggcggcggcggcggcggacatgatcggggtgtactgtctgtataagaagctgtactgtatgctatgggttctatggtggtgtctatgaggtgatgatgtcgatgatgatggtatgtatgaaccacccttttgcaccagtccagactaggtgtttccgttggaaaaagctagcttttctcaactttctcacgcgaaaagagaggaaaaacactgaaatcgcaactcaaagtcatagggtcaccatatgtacagtagtagaagagtaacatgttgacaacgacatcaggtcattaccatcgataccaacaccctggtgatcatagtcagactctcccccaggagtttcatgaagaaaaccccgtcgatcgtgcaccatttgatctcgaaaacacatcgtcaccatcacctccacaccacccggacccatccggctaggtataacggcacgctccccgctcctctcaacactggcatccccaacatgatctccccacggccggtacctcaaggtttctcccctcataccgagaggaacgctaccatcctcctccccgttcaggataaaccgttcctcaacccgattcaagagtataaccgagacctgagcgtcgccgtcatccgacattgggcgcagacgagggaaagagaggtcaaggccaagtgggatcagaaaaaggccaagagggatcaagggagggctaaaggtcaaaacaagcatgagaaaggacaggatgtgggacaagtcgaggcgtgtgagtcgtagttcgggcgacgagacgacctctcccccaggtcgctctctctcaattcgagtgaaatctcccatatgtcgatcgattgtctctctcgcgcgcgcgcgtaggggagttgaagcaaaatctactcttgaatcgaaatcagatgcaaagttgaaacagatcaactgacactacccccacctctcttgatcgcacacagccaccctcgaccctgcatctttgacgtctaccaccacggcgaaggggggagggggttgggcaaagaaggtcactttcgcccccgcctgattgcggtctccttcttgtgctcgtgccttcactcgatccctaacgtgtcgaacgaggggtgcttagacgtggccagcgcccggtcgtttgaccgacggcctgtcctgatcccgggcccgcttgcccgttccgccagcctccccttggcgacgagcatgaatttgacattttaagtttgtcgcccggtcctttaccccacacgcggtatcacaaccacacagcaatcacaactcaatcagatcgcaatatcacacggacccatgacctgctgctcctgcgctgtgactctgggtgtcacgagcccttgaaaggggggtgggggcggctttgaagagaaagagagtgtgtgtgtgggggtggacaattgacgaccgagcggtcctgatacgccgtgcggtgtctctgtgctccccacgcggtaaaagtccgacggagctgtgcgagtgaatgtgccccgtaggaagggagaccgcgggaaaagggacaagggagcgagcgagcgagactgaattgatcgacagcgaatgcttgcaagggaagagaaggggggggggggggcagttggagaatcgttgggatacctggcagcaaacagcaaacatcttgccagctatagacagccaacctatcatccatccatccatcacttccattccttgatatctttctctatcgctctgtcaccatcacacctcttcacctcgtcacacaaggctacattcaattgtcagccctttgacaccacgatcaacctaccacaaaccacgatcaacaccgaaaccgactgctccacgacaccgagtccaggcgacttgcttaaccgacgttcattccggtccttgacacaaccaacctcttcagctcgacctcacacgacacctacatcaaaagattcgacacacggcccatatcacgcatcactcatcacatcgcatcatgatcgacgtcaaacgaaactctacgatcgcgtccgggtcggaccgacacgtcaaggccaagacccacgctcacaaacccaccaccatcaccaacagcacctcgaccaccaaatcggtcaagaacgaccgggatcgtctcatctcccgtcgagccgtcgaaggcatgatcgccgaaggtcacatcattgtcgtctatgaaggtcaggtcttgaacctggacgggtggatggacaagcatcccggtggaaagttgcctttgatgcacatgatcggagtcgaggctggcagtgagatcaacgcgtgagtcgcagtgcccgtgttgcgatcaggataaaacgaacgtcgacgttgatccttgttgtctgtctttcggcccacctctcagataccactcgggcgcgacgttgaagcgaatgaccgcctaccggatcggccgggtcgatggacactggaagaactttctccctcccatccgaggtggagtcttcaggaagctcgccgcacacgattgtcgaggcaaggcttgcggggcggcctgttcgggagcggatagcgagaacgattcggcccaggattcagggtactggtcggccaccgatgagagcgaggcttcgtccggacggagcgagacccagggggacgacgagagtgtagaggccgcagggcttcgtcgtcgtcgtatcgccagtgtcgccgagaccgcctcgacctcgcccgctgagctcatcaccaacacgcccgccgccacgcctatccggcccaagacccgggacgagatggtcgatgacatggtccaggccgggatcgacaagggactcgccgagtacccttcgcccgacgtcgagacccagcgtgtcgttgccgaaaagttccgagccttgcacaaacgcgtccaggacgaaggtttctacgcctgtcgataccgcaactacgccaaggagatggctcgatacaccttgctcttctcgctcttcatcacgttcctgcgcgccgaatactacttcacgtcggccatcttcctcggattcttctggcaacagatcatgttcaccgcccacgacgccggtcaccgtgggatcacgggcaagtttgttcccgataccctggtcggcatcttcattgccgatttctgttgcggtttgagcatcggatggtggaagtcgtcccacaacgttcaccacctcgtcaccaactcgcccgaacacgacccggacactcagaacgtgccgatctttgccacgtgtccatcccagttccgcgattcgcactcgtcgtactacgactttacctacgtgtgggacaaggtcggcgagttcatggttccgtaccaaaagtacacctattacccgatcatggccgtggccaggttcaacctgtacatccttagttggtgccacttgctctcccgacgaagcaagcctcttggagctgccgcgtggacccgaccggccgaattggtcggcatgacttgctactggttcgtattcggatacctcctcgtcctcaagaccttgcccgactggtacacccgggtcggattcgtcctcatttcgcacatgatcaccatgctcctccacgtgcagatcaccttgtcccactggggtatgcccacgagcgatcttgggaccgacgagtcgtttgctcaacgtcaactccgaaccacgatggatgtcctctgccccgcctggatggatttcgttcacggcggtcttcaattccaggcgatccaccacttgttccccagggtcccccgtcacaaccttcgtccgctccagccgatcgtcgaagagttctgcgccgagaccggggtgaggtacaacattcacgggttcgtcgagggcaacgcttgcgtcctgagcaaactcaaggatatcagccaccagttgcacatgctcagcaagtgtcaggaccacatggccgagaccggcgagagcggtttgtaggcccggacgatctgcaaaaagaaaccttcaacgataaccagcaaagtaaaacacgccaaaggaggagccaggatcatacgatctttgatcccccggggcgtggattctgcgtctttcttcattccatatacccattcttttgtaaaagcgacagagatccttagagacgtgtcttcttgcgtctcttgtcctacttgttccgcatgagtgcaatacccaaatcgcatgtcatgattacgacccattcagatatcttgcgcttgactgcagtttcgtctcgttgccgatcatctacctcgttattctctccgattgagctcaacagaattctatggttttcaggtccagaccctgctgagggttggcttgtccctgagcgaccaaaaatgaaaaggcattgcagtggaatctagttcaaccttcatgtaatatatcgtattcatggtgaaaacgaacgtcagaaccagccgagatctgagtttctcccaagcaggattcatcgagacgaaacaggatatctgtttcttccggacggtcaggtatgcctctatatatactggctggataagatgccgaggtagatcatgtcagccggcgtacgtcgcctcggaagccgacgttgattgactagacagctgattatcaaccaacatcgcgcgccaaagggaggttagggtagcgcgagggaaacgagacgcgggggggccgaagagcgtgggcaaaaaaggcgggaaaaggatgtatatgcttacgagcttgcgagcggtggggaaatctgaggttcgatcgacggtcaagtgggcgagatcgacacgggctcatctcgtgctcttcggggattcggcgggatttctgttccggacgcgaggtccgggtaacgatgaggcctttttcgtccgccatatcggtgtttccgtttggtcagcattaaataatcagacgtgatcaggtgctcaggtacgctttcatgtggtctagtcacagcgagcatggcggaccgttgacaatccggacatgccaacagctattgcgggtaggtttacggccgccgcgcttctggttcccaaatcaaaccccttggtagccagtgattatcgtcgcggtatgatggatcggaggtacaacttgtgctcttggcttctacaatctcacgcccaatggcctcttcacctgacgacccttatcccattctcgtcttcttacgtgccggcggtcctcccatcgtgctcacattattgacggccgccatgaacccgttactcagctgagtctgcaaggaaggccggaaaggtatcgcggagcccgatgacggattgtttctcttgagattggccatggcgaccgtgttttgcgctgcttgtaaggatgagatggctggctgactgcaaatgatcaggggggtagcacaatggcatcgcggtcagctgacgagaatctgaccagcatattggtcagctagcctcaccttcccatcttcgggtccccgttgtcctcgtgtgtgactctgcgagacggataaacgaattcggaccccgcaaaagcactgcgatcgagcgcgtgagcgtcagcaagcacggtcatactttgtcagtgtcgccgagcactcacttccgcatagggtgagggtcctcgtctacgaagtaaccgtggtccagagcctttttcgcggtgacccgtttctttggatcatactcgaacaggcgcgttagcaggttgtaacccgccgtagaacgcgagcggacttgataccagtgagcgagcgaggatgatcgtctgcgaaagggctgttgatgaggacaaatggtcatgctcgagagacaccgttcacgaacctctcctgccgggcgaactctgggtattcaggcatatggactatatcgctccaacgcttctctatatcgcgacagccgaaaacaggtgtttagctaaaccatgcttcccaatcgtctcaatacggagctcaccatccggggttcccaagacgtcgacgatcttgctcatctgatccctctggaatggcatccccttgacgccgaggatgccaccggcaccgatctgtaatcccgctttagcatgatgagcttccatcttggcttcttctcccttgaaaatgggtcgcagagcgagtagttccgcatagatacatccaactgcccagaggtctgcgaagatgtcggataagctggacattcatgggtgcatcagaatgagatgacgagactcaccgatggcggccgtgtaatgcctcgcgccgagtaacaactcgggacttcgataccagatggtcacgaccaccttgtcaccgttccatagcggtaacaagggatccctgttgatcctcgccagtccgagatccccaatcttgacgacgcctcgtgaagtaacgaggatgttggcgggtttgaggtcccgatggaggatgaaattggcatggagatgtgctacgccgatgatgagttgatggagcagtgatttgagcgtgcggggagggatgggttgtcttatcgtttgcgagtgataatggatgatttgctgcatagagacgtgcccggtcaggcgacccgtacggttctgaccgaagcatagcaggaagtgacataccaaaaagtcgtgttctgcatattcgaataccatgtagatgctcttatcctccaggatgacctcgcgcaacgtgacaaagttctcgcacctcccgccctcggtctttccatccctcgcctcatcgacgacgacgctgagctccctgttgagcgaaatctcccggatcgctgattgagagatcccggtgtacgtcgtccgctcgccttccttgtctggtttgaactttttgatggcatacaggagaggttttggtggatctgaagggttaagtgagggcgagggcgcctgtttgatctgcgctttgtagactctaccgtaggtacctacacgtcggggaggtaagctcgaggtcgtggatgtgaataggccggtatcgactgacctgatgagatgaaacccaagatggtgtacttggatagtacagtctgtctcactgcatccttcttggacctccatacgggcatggggtcgggtatggtctgggttgaaagtggcatgactcatgtggttcctccagctagtcagccccaattcatcatttcggtgtcgggtctggcgtcgtcgagtcaaacttgcttattccgactcgtaacctggcttacgagtgggatattgcgatacctcatcagccgatcaggactggtcgatggctatcagcggatcagcggagagattgaggttgaatatggtcgtgtgtccacagattcgagcacaagcgcagatccttgatgacgagacccgcgagggacgcaacttacaaacttggtgattgcaaaatgatgatatctaccttcttcctggccttgtcgtagacactaaagtcgtcaattattgttccctagcttgagatcgagaattatccggcatatccgaacttcttgccatggacaatgatatggagatcgatcgggacgagacggcgggccgtccatcactgctcgaccgactgggaccctcagaaccagtcgctcccaccacgacatcagaccctgaccggttgaaccgattactcgatacgccactcggggtggatcctgacgattgtaacccggatctggatgacgagccgatgggagccgatcgagaggctaggctggactcgtcattggacaaaggattgaaagacaggttgagcaggtcgaggctatatcttttggaagagtctggtaccgttatacatcacccggacatcgaggatcgcgaggtcagtggagagcttcaaaggttgccaggtctcttggctaacacgacatgcttaacataggaggaagagccggatttcacatacctaggtaagcccgccgatgcagcccagatcgtgcggaattgtaaacctgaccagctaccctgtgaaccctgcagaaaacctcgagagcgaatcttcagtccgggattgcgcattacacctctccggatttcccttgcaaaacttgagcacctcgcaggtgtttagctatgtgaccatgtttgcgccgaaacccgtcggtgagttgagctacgacgacaacgacaaaggtagactagccttcgtgcttactgacaagtcgtcccgctgaacaggcatcgagtggatatcggatacccgactgtgtatcgtctacggttcgccggcgtcaaccaagaccgccttggaactcctcgccaagacggggttcgacccataccccccgcaatcggacgacccgctggaacttcggagtgctcaagccctccctaccgaacttcgggagagcatcatcgccacactcgacgaaaaggagagagggagaaacgaagatgacggtcgactccggatgcaggatggtttggtcgtcgcaaaggggaaagaggaacgggacgacgttaacctccccgagggtcttcgaccgggtgcgaggttggacattcggtacgccatggaagccgacgtcaaggcgcggaccaaggcgagcgagagtcagtggtacgccaagcacggacgaggtgcgggaaaggaacgagcgaatctcctcaccgataaacgcaagtacggtcgatatgccgatgcgcctgacccgcaggacgaaggacgggatcgcgataggaggaggggtggaggggatgcgagtggtcacggtcgtcgaagacgttcggctagccccggtcggcgggaagggagacgaggtggacgaccgacggtcgaggatttggacaaggaactcgacatgttcaggtcgggtgaacctgccgagtcacgaagggaaggaagggaacagcgtgggggcgagagggacgatcagcatggaacgagacgaagagggagggccaagcaggaagatctggatgcaggtgagaactttcgacggcttcacgcatggttggggaagagcatcgctaacgaactaaacgaaattggttcattgtgttgcagaactggacgctttcttgaaatctcgagactagacttttctaggcgacatacttggctagatctgcctgccttttcgagtggtcacggcagctgcttgtagtcacaatgtatcatgaatgtggggatacagcaggcatttctgaccgaatacagggacgtcaaagagaaccaagtaggaaaacaaaaagaaatcgtcatgtcgtaaagcagatttacgtcgtatcgcaagaaatcatctatcggctctcgatccaaggagctccctgaatatagttgcccttcttgacgacggcaggggatttgcccttgtcctgcttgactcccaatatccccttgagaccagcgaatccaccccgctgtctcttcctctccgcctcgtcccgtgtctcctcggctgccctggcagcccactcctcgtccgagtaataccgatcaaccgctcggccctcgatcgtcaccttgcccttgcccttgcccgacgccggcttcttttctgcttcagactgcgcttctgagggcttgtctgcctgggtcgcactctcgtaatcgccctcaaaggcgttgaagaggatagagctggggtccgagagcgagatgctatcgtcaatgttttgaacagctaaataggccttggcgataccagggtccggagtcttggtcaggatttgaaatctgtagcatcctgcatgcatcagattctgctcgcccacttgagctcctgattgatggtcgcaaacactcacctcttgacctgcctctccctcgtcctctgctcgtcctcccgctcgtttccgccttgttgcccccggtcgggtctgggctgggagatgaggacggtctttctcgtctggagcaagttgggcgacatgtgcatagccgaatgggggagcttgttcagggtgatcaggtcgtatggctatgatgacgaaatcgagtagcataggttgggatccaattgaggcacggtctagcagtgggtcaggcttacatcgaggttatatttcaaagcgagggagcggacagtgtctcccttgcaaacgacgtgttccttgatcgctctctcgtccgcttcctgcatctccctagcctggcgcagctcgtcaccttcagagagcccttggtcggctcggattgtttgctgagaaagatcccgctgacaggccggttcgatatcctttgcttcgtacggcggaggagcatcgccgtctatttcatcttccagatcggaatcgtccccgatctcgaaccgatcatccgcctgatcttgctcttctgcttcgacctgtttggacgtcttcgtcaagctggtctttgatccagaggccattgcgccaactccactagcacaccagagacaaggattataatccctgagtctcgggttggtattcagacatcgcgtgcagatgggggatgagcagcacggggtggtataagtcgagtctttgaggtcgataccggatttcgagcgtggcaagagggtcgaagagcacgatagacaaaggggtactggggttcgtttcttgacggacatgattagcgaagtcgttctgagtaacctgtaagcctgagacgtggttatagatgtcggtctccgaggtactagccgtcctacgatataaatcaagataattgaactgtggcgacctacatgatcgaggtgaccatgatcggtcagaggcgtctagcggaagcaaatttctcgatttcttccgatcgacgagggcggggaagcaagctaagctaggggagggggaaggagactagctagactctcgaggtttattggggccacttgttcatattcatattcatctaacctaggcctaccaccttgacttgtcgtccagatagtcatcagaaactagcacaggtcacctcttcaatcgatcgtggcctcgagcacacaaaacggacagtttcgacgataaaggttggcggccagtgacggtagtacggcacccttgatagacttttgcttctcgtccgcgcctccgctcgcctttgctctctcaacggtcgcaacgcaaacctacatcactttactggccttctctcaatcggggtcatatcgtggtcctcgcgaaacctagcaacccctacctcatcaaaaatacagcattccactccgacgtctgccttgcaagacactcgagcaccgggtctgccgacgtctggtagtctgaggatccggatcccgaatctcttgcgcgatatggcttcttcgagccgaggagtggatggtacacggatagttcccgattcatttgcgagtctcgaagtgagtcctggtggtgctgcggttgatatgacgaggtatcgagacagggctgatgggttcttccgcggtatctcaattcctgtcgaccttgattggcagaatttcttatcgttagagatccatatcctcaaggtcgatcagctcaagtcggtgagtcgctgtgcagcggctttaccttcctcttcgttctatcgggaagatattccaagctgaaccggtctgactcgacgtctctcgctgaatcagctgatacaattcctcaacgacaactactctttcgccatccggaaagctgggagaaagcaagaactagtcgacaggtacgttcaatcatcttcgccctggcatcgtgccgtgatttctcgacgacctttgacgctcatcacggtctcgttccgcgttggttagcatttccgacgcctttcgccagttctcaagaagaggagaactcgaacgatatcgagcgagcaaggccgagttcaacaggatcgcttacccgccgtatagacctggcgtcatgattcctggttatggtggatatacaagttactcggggacgacttacccagcgaggacgatggggaccacttgtgagtcgactttggggattgctgcaggatctcttggggatcaaaggagaagctgctgatcggcaggcgatccgtgcgggtgtccgttctttagacggaggatcttatccttcgggctcgaatggagcttcgacgagcgtgccacagctgaggggtgagtgacagtcaaacatcctggggtcctgcgtatcctccacgaattcgctgagcattcgattgacaattccaggcccgatgacgttgaagtggaagacgacacccgcgtggaaggtcatcaaggcggttggcgacctccagcccgtattaggtcagtcatggtttctgccctcaaaaaaatgatatcgtgttattgacgttccgacgacacttaatcagctgtcgaggacgattcgcaaaagcggatcagtaagacgtcgagtttcctgcttcagcaggatgttgtggacgagataaaacaagcgtgagtcgcagtcctttcatttcaatgccgtatggggagaacatctcgctcactttcttctccgagccagtcccgtcaacggcaggaaaaaggcgcttcgattgttctgcacgtcttcagaatattatccgcaaaccgatagcaccagtcccgtatacatggatttcccaaacaactacgagatcacgctcaacacgcaacatctaaaattaagcaagggactcaagggcaaggccaattcgaccgccccagtcgatctcatgcaggccaatgtcatgaagatggcccccgggattcacaatatcctcaatttcacacatacaggaccgacacttaacaaaaagaccaagacagccaaggtgagtcgacgttgacgggcatccttgggttgaataggaaccgccaggctgatttacttcccactcccactcagagattctactttcaggtctgtcttacggaaatgacaaactcggaggcgatgaagcagcaggttttggctcgcaaaaagactgcgtcagaagtggtaaagcaaagtgagcctgtcgtgggtgatcatcaacgcgggctggtgttcaacagattctcatggtatacttccagtgcaagttaaagaagatgaagacgagattgaggttggatcagccaggatgtcactcaagtgtccggtaagtcgtgttgaaaagcagtctagacttgtcctcgctcacgctagttgtcgatggacagctgtcttatgctcgcatagctcacccgatgcgctccgatttgtgcacgcatatacaatgctgcgatctggattcgtggttgctgatgaacgagacgactccaagttggacctgcccaacgtgtgaccgcgaattgagcttggaacaggtctttgttgacgagtaagcccgtgtcgtgtgctcctctcgaccaattgtccagcggtccgctcatgcgctcaattggcaggttctttgcttctatcctggccacatgtccggacagtgtggatgaggtactgctcgagtcgaatggggattggcataccgaggatggcaagtatgcttcgccatcttggacagcggcaaatccaaccggtccaccacctagtgcaagactactcgctgggtccaagggcccctcgcgaacggctacgccggatccgctgatcaaggtcgattcacctgcagtcaatggaacatcaagcctctcgaacggaagctcggccagtccagctccagccggggccacggcagctgtccaggtctttgaattaagcgactcggatgacgaagaggacgtggtgagaatcggtcaccgacatccagagatatcaaatcggcgttccgaatcgacaactcaaaaccacacgccctccgtgactcccgcaacgcttgatgtggggcctggaaagggatcgaccgcaaacgatgcgatcgcgatcgatgactcggacgatgatgacgagattgtcgtcccggtgaccaccagcgccaagcagccgatctcgggcgatgaaaatgacagtttcgaccggccgccgcgaccctacgcctcctcgcgagattcacttgtcgatcagaacggcaagcgtgccagggagtcgccagagagaagcaatgatctaggcgacgggaagcgccgtaggaccgtttcgtcaaacggaaatcaatatcaggcctcagacagtcgacccaatcgatcgatggctgcagacaatgcgtctggcttggactggggcccagtatatgagagttctcctcatacttccagtactggctcactttctgaccgccgttcctcggacgactaccgacatcagcttcgtcagcacgtctcgtcatcttccagagggatgcaaccggatagcgacacgatcgtggttcaacgcacgtctccccaacgcagtcatgatggtggcgcggcccctaacgggtacgctagctatgcaaggtcacccaactacgaccaatcaccgcaacaaggtctatcgtcccccaactaccagagtaacagtttcttgccaccgcccatcccaaaataccattccaggttgccgccacccaaatcgcaaactcagacattttcgtcgttttcgaaaccatgatgatgggatcgatggtgtttctctcatggccacgacctgagaaattgcgagtgagctcgctcggatacgccgcagacacgaccaaggttcggatatagcccttacccgacgatcggttttgcgctacgaaacgcctttcaaggctcgcaagctctgtctgccaaaaagattgacctcctctttgccgacgcagcgatatataatgagttctgtatgaatgacgagagaagccatgtaccaccagaattgtagccatttggacgaaacacatcagttgttcatgtcccgtacgttcgctcgtttacaaacaagtatgacgagtcgcttcgtgattctcgtttgcttccggtgtggaggcgatctcaaaggaagggtcaactaggtcgatagtcgctgaacttgtgtgatccggggtgaacgacaagctacctctaagcctcttcacttcagacggattacctttcatcatcgtgccgatatacactgctattcaaagttcgagccgagtagcagtcttctcaacccgtgcaaaacagggaatgtgatcaggttcagcgatcgagttcgacatcaacgccatcgaactagatctttaaggggctttgcgtctacattcgccatgaagaccatcgccatcgctctccccctaggagctctcggagccgctcaagctcatcctctgagcgatccgttctccgacccggatcatgaacatcgcatgggttccctctggcactccgaggacagggaagggtttgccaatcacgcgaatatgctctcttgggatggagacggtccagccgtctggcaatggatgcagggcaaatcgggaggtttcgccggatggcttaatccttggcaggagggtgttatcaacataatcgtcagtgcagattacgacgtccttcgtgttcaaggcaactgatcgtgcgaccgtttcctggaccagatcgaagaggatcgaaacatcagcatttcgcaccgcctcgccgctttccctgccgagctcgctccggataaatcgtatcctctgacaggtatcttgcaaaacatcacctcgttccctcgccttgtgacttcccaagacgctctcctggtcgatccgatgtacgcttgcgacccattgacgatcgcacgtgaccatccgaccttgatttcgcctcatcattcggaagaatcgaaacaaaagagaattgccctcgtgctccggggacactgctccttttcccacaaagtccgtgtcgccgaggcgagaggagccgatgctgtcctagtagcagacgatgtgaggcgggaaggagaaatggacgaggaaggtcgagagagggacggcttgttgacgatgtactcgcccggttagttttcgtggcgatgatggtcggaagacacccgaatctgacatcttgactttgaatcacagacgacacggaagatatcaccatcccatcgtctttcatttcgcgggcatcgttcctgctcatccgagatttgcacagagacctcgaatcgagtgggagatcgcacggtctcgaaatcgagatcaaaccggatgaagggtacgactggtatgcgcctttgggagtgacccggtttgcacgatttggctgacaagccctttgctctacttgcctatggcaggcctctgaccgatatgctcatgttcgtaatgctacttccagcattcatcacgatcatgtctttactagttgggaggtaccgcgatatgaggtgagtttctacacacactgttactgaatctctttaacgcaatgctgaacatctctcgctcaggctcgctgaagcggaaagagcgccacccaccgtcgtcttgtccctgccagaaacgatctggaccccggaagaatgggaaaaggaggactcgccaccgccgacggccaagccaaagttgcgttctgaggacgacaacgacggtgacgcatacgatcactcggcagaggatcgatcaaaggtcgtccagccggttcccatccccagtggtttaggtaaaggccccatcgatcatgacgagcagagcaacgatcccgaattccttggacctgcctgttccccgcctcgggcttcgacttctgcttccccccagcctgcacaagtggtgcccgcaccatcgaaaaaatataaaaagaagttcttccacggcgacgagtgctcgatctgtctgaacagatttgaacgcggggatcacgtcaggattctgccttgcggtcatctcttccacaagatcgaagtcgatagctggttgttggagtggaagaagctcgttagtctcgtttatggttgagcggccctgatccatgctcacggatgcttcgtttcatgtcttcagtgcccagtctgcaggatgtgagtaaatcgcgctgaattaatctgctcagcaagctgactaggactcatcgtagggacgtcacacaaccgttaacagaggcggctctctctgcgtctgcctcgaccatgaccacgccattgggttccgcgaatgctgtccctgagatccccgcccaggcaggtttccgaggtcggtatgcgcgacttcgaggctaccttcccttcggccgaatgtttggcggactggaagagggagttgtcacagggcatgaaagtgtcgaaggccgagagatcgcgcatcgaatcgaagaggagccgaccgaaaggacttcccttttggattcttcccgatagcaggttcagcgagaatagttgtatgcatcccatatctttttgtatctctctctttgtctcgaccaatctacgatcgtcttatcatcgaatacatcactctgctccaacgtgtctccccctccgaaatccagtccccttctccatcgatcccatcccataacgctttgcgggaaactgctgcattacttgatgttcttcgtcttgtctctaaagactgccttcagcttcaaatgcaaggccgaatttgtcctgccttttgctttgaactgcgtcgagcaagatcaccggaacgtcaacacacatctcctttgcggttttggtatcgttctttcatcgacatcgacttacgtgcggcatcgcggcgaattgagccacattgttcttagcgacttcgtagatcgcgccccataggatgtccaagtcctctgtgacacaaaaacgctcgatttcagcgagattcttccgcagagcgtttacaaccaagtggaattaccgtctttccatgggttcgcagagccgcgcttcttggaaggagaacatgccgagtcatcccagctctaagatccgttcgcaagcgaagttgcgccgtgttaatcgacatttgctattcgagcgatcttgtgaactaacaggttctcgttttgctgtcattgcgactttgaagagagattgactgtgaagacttcgaaggtgccagacggaaacgtcgaattgaagacgcttgatggtggatgacagagcgtttctttcttgggatgcagcataggcaataatagtccgggattctgtgcaattaatcaagtgtatatgtagcagaaagagatacgtggcttctcaggctgaatcgagacgtctttctttgtcctatcagttagatttcgattgtacaacaaactggctaaagggactcggacgatcctctttgtccgatgatcaaaggcatttgcccgatctaaaaaaaaggcagtgggtggatcgtcccggaaacaatgaaacaaagagcgaccatcgggttttcagttcatggcactccgttggtttgactaacgtcgtgaactctccgagaagctcagaaacatataagaacgcttgcgtcgacttcctcctcacttcgtttccctgtattctggcttgaattgcatttttcattcatacagccaacaagatgcccaaacgaacgctggcacgttgacgtttcaactctctcgctttcaaaacctcgaatattgtcgctcacccatgcaaattttgaattttgctagtctgaggagaacgaacaacccgtcaaatccgagtccggcggcacgactgacggatcgccgagtaagaaaaggccctacacgaggaagacggaagtgaagaaaagcgcagccgtaccctggagcgaaggtagatcgcatggttaccaacaaatacacctcggcagtcgtggctgatcgatgagcttctgatatgctcacaataatgctacacagtagaggtcaaggcggtatggagaggaatctacgacatcatcaaaaagggtcacgtcgtcgaactcgccaaggctcccgaggtcggtactcgttcggcggtcccgatgcgatcgtgagagataatttactgaggaaatccggtttaatcagctcctggagtacggccgaacgccttcgagactgcacaacaagttggacgctctgttcaaggaactgatcaagtgaataacgcgaagggaattggggcgcccagcgcgagcggaacgtgttggtgtttcatcgttgtcggtatctcattctcctggatagtagaccatatgttgtatcatctttcggtatcaaggagtatagaaacgaaagtaattgaattcggacaaccgacgctatactgaattactggccggttactggccagactaccagagcaacgcgcaggattcgagcttgttaccacaactaacgtcttctttgggtcggttcgagcgtggcttcgatcggattcaatgcgacatcaagcatgcacggattcattggccgacgtcaatcatgtacattcgatcctgggtttagagtttggcaagctctcttgagcagagtatcgagaagaacgatggggactcccagtttgtatcgaccgatgatctaccaagcctgacgatcaagtgccctgatcgcttttgttcccggatcgccctctggaagcggcgagtatatagcaattgtatcactatcccgacctccgttcactctctaggtgttcatatgtgcagacactatatttgttagacaatgtccaaacgccaaaacgtaagtcaggtttcacacctggagttttattccgaattacagaccgcttgcgcctcagaacgatgacgggatctcaagcgtcaagacggaaggagcgttcggtgcttccccaccaaagaagcaaaaaacgggaggcaccaaatcggacaagcctaaggcggccaaaaaagtctaggatgacggtgagccggagccgtgatcattgggaatcgatcgcgcttgtcgatcgctaaacagcgacgcatcggttgcagaggagatgatggcattttggagggcgatatacggtctcgtcaaagagaatatccctggcctgatgcagaatcccgaggtaagtagcccttgttcgtctgttcgttcgaccgccgttgaggaataccatactgtgcttttgcagctcaaaccgttcggtcggacgagcgctaatctgcactgcaaggttgatcaagtgttcgctttgctgactgggaagaagaagtaaaggccatttctaggtactcgatacattagctagcttgaagataggcgatgcagcagatatacgatgatccgagttgttgaacataaggaagggtcccgtcgttgttctatggcccgaggtatattcatacactaaacttacaacccaagttccaatttcacgtcgtcgaccaagtccctcagaaactttcatcccccgtataaccgctcgctctgctcgactcgttcctcgacatctggcttcgctcatccaggtcccgttgtcgacgttcctcatctagcttgcgttgttcctcttcggcttcgttgtccgtgatcagagcccagacagatgccttgaactatttgatccgaggaagtgaggatcaagtgatcgaattgcactcagtctttgtgggaaaaaggaaacgagcggtaatgtcaagcggactcaccaaggtcaaaaccagtcccatcttcttctccagcactcgtaggtcatccaaaagcttgtcgttcggattctcggcagtctctttggccaaagcatcgacctgcaaagaaacggcgaaaggttgcgagcatgatttcagccgtctaccgaaagtgattgaaaggttggcgaagggaattcgagcttactcggcggatcgctttagctagcttggcgtactcccagaggacctcggcttccagttccgagcattccggatgaccggcactatcatgtgatatgtgttagatcggtctgggaaggtttgaaccgggactagcggcgtactatgggttgattgtctcgatatcgtttgttgccctactagccatgttgtgcggtcgagatgtaaaggatcttccgccggaagacctatcgcctgagattacgttgagtctaccgtaaacagtgaggtggagaccttgtatcaccgcgaagagatcactgctcgaaggacaagcgtagggaagaggttgagtggtagttatggtgcgtatatgttgtaggtgtttacaggacgatgatgccgttggtcccaaagtccgtgaccgatatcgtaaacaaatctcggggactttgaccgacaaatatgtacatctcgcatatctcggacactctctactcgcatcctcatacaactgctctcgatcgtcataccacgtacagaggacctctgccttagttcatcgagtcctcgcccatagtcgaacgattttgtgttatcgactttcttgacatgatggacgtggacattgcgggcacgacccgaagtcccgctctcaatctgaacatcattcgaatcaagagaaaggccaccgaggcgccgttgacttcgcttggtaggtcagattcggtttagccgctcgatgagtgagaaaagctgtctgattctctgttctgtgcttcgatgtatcgccatgacatgcagttgttcaggaaggggaacgagcagccaaacgtcatcgggataccgccccacctggcccgctttcacctggaccctcgagcaatggagccggtcatggcgtattcagactggcccagacggtcgatcatagttggtccgccaaagctgcagaggaagccgcactgagggtgagtcgagccctggtcctacacgatggatgccgctaaactcttgcgtgtctgcgtcgagtaggagaccatcgaaaagcttatggccgagagcaaggctcagttcctctcacaatcgccactggaaacgtcttcggtacaaccgggaccctcactggccaatacggtagcctcacctaaatcgcccacgaccgagatcatcccgcaagaacgacgctatagggtgatcaaacctgctcattctcaaggtcggaaagctgggttcgggagcaggttcggtgccaagactgcccaaaggtgactcggattgtctgtacctctttcgcaagtgaggtctaatcatccggtatttcacgtcaaacagtatcccgaaacctcgccaggattttcgtttgatcgatgctcagctggagagctctgtacctgcgccggtcgagcccgtcaggcggagggcgtcctcaccagctccaccaagaatccggacggaaggtgaagatgaacctattgccagaaaagaccccaagcagtcgcaatcggcaccagccaaggaggaagagttggatgacgatatgaaggagatggaaaagttcctgccgatgttgaccgagtctctgggtcgtaagtcgctaccgaaactgggacgatcggattagtctcgtcctcacgatgcatgcacctttgagatagtcgccgaccgttcggatctggctgctggaccgagtcgagaacgtcaaactgccaagcctatatccgtgccctcccggaacatcccgccagccagcttgtcttcgtcgcaaatttcggtccgatcgaacgctggggacgatgacggcgattgggtgtacgacctttattaccgggagccgaccgacttgagtgcgcttccgcaaggggccaatggggtcgatgcgggactgggaccgtttggcgacgggatcatggtcggggctttggccggtcttgacgagctgctggacgatgaagatgatccggggagtgataccgaggagggcgacgaggctgacgaagattcgaatggtacgatttgcaaaccctcttccactttcgatcgaatgctcacacgacattgccatgacagaggaaaacttttatcggaacgagtacccagacgaggagtctccttctccgtcctcgtcaccggaaatgttcactcacttcagtatgcgagcccaggatgctcggaatcgacgcgtcgtgaatggcaaagagcgctggaaagcatacgaggctgacgaatactacggaaatgaagacggggatgaaggtcaagacagtgaagaagaggaaaagcgaatgcccgactggcgagccaatatgaccaggttgcaacgaaagttgcgcggggaagagagggagagggatcgacgtctcgctggtttgcggaaggtgcctgtacgaggcgagacgcggggctctgacgacgaggatgacctgagcgaggacgacgacgagttggaagacatgagcgatctcgacgatgattagttgagtcctgccactactgtatctctacgtttacgtacaaggcgtttctgcaaagcggtcaattagaaaccccggttccggctcgcgcggtctgcattgacgtggtttggacctggtcttgcgactcgagacatcaaacagagtcaagttgatcgacattttgattgcttagtctaacaataaaagcctcctcataggtatcgttatcaatcgttacattcgtggctgctcaatgagccgtggcctagtcgtcatcttcgtcctcatcagactctacataaccccatccacccgttgcaggagcgtgggattgaatcgggccctgattcgcgataggagggacgaacggtgcaggggctccgagatccatcgcgtcctggccatcgtcgtcgtcttctccttctgcgtcttcatcttcatcgtcttcctcctcgtcttcttcctcatcatcatcgtcttcgtcatggtgctcgggggaattgagcgagactgtgccgtgattggcgatgctagaacctcgatgtcggttgtctccatcgccatcgtagtcgttatctcgaggggtagacatgtgtccgggtgtactcgtcgcagcgccgtcctcgttggcaaagatctggtcccactcgtcgtcctcgtcgtcttcgtcgccgttctgcgcagagaatccagctaaagttgagcgtgtggtccggaaccagaggtagaccgtcacaaactcacctcgcctcgcctgtcatcttcctcttcttcctcgtcctcgccaaacagcccgtcgtattcatcctccttttcaatttccttgacttctcgggccttgtctttcgcttcgactttggaatcgatcttgctctggttctcgtcccgggccttgatcttggaagcgagatcggcttgatacttggtaacatctcgttgaattcgcatctgtcggtatccaacagagcgtgtcagcccatgtaggtagcctcgactcgtcatctggtcgcgtgctactgaccctgatcatggcagacacgttttgcatttcctgcgtcttcttggataccatctcttcgagggccgacgcttcttgttccaagagacgctgctgagcgcgcaactcgacaatctcttcgtcttcctcttcttcctccgcttcatcgtcatcgtcgtctccctcctatcatcgagatggtgatatgagctgaaaccccgcgacgatgagtagtgatgaattgaactcacctcttcatcctcgtcctcctcgtccgtggcgccctcatcttcatcgcgattcaatgcagcctctaaatccatgtccatgtccccatctccatccacacttcccaactctgtccgatcttccatatcacccatcgcgctaccctcttcgagcccgtctccctgactccaaggcgtgccaggcacatcttgtccgagctcgctatcggccgttccttctcgataagggtaaccctggtcatcctcgtcatcgtacccatcttgatcatcgaggtgggtatctagttcgaggaggtcttgtggcgatgcagacaaatcccgtctctgtcagatccgccatttgattggacgagtgccttgaactgtgacgctggtgaactcaccgaaagaggagaccttggcttccttgtccctagccaagagcctatccacctcggccttgatcatatcccccgtgcggtgcaatctccacctcctctccctaacgtgtctcaagggcggtgtcaaaccatggggccagacgtaatccttggggtctagcggatcctgcgtgacctgatcttcggaatcgatcgggtccgggtcgacgacgagcatctgggaaatgtcggccactttgaacagacgtttccggtcgagcgtcttttgagcttcgatgatgcatgggagatcgacgagcttggcggcgtagttggtaccaccatggttgaatactgctcgccgggtatctgagcgatgtgggatgggaatcgagcgtcagtatggggggttcgggctatcctgatggcgaggacgatggggggaaggggtcgctcacccttgaacttgaaggaagcgttgttgacttcttttttctcctccaacaaggtcttgatacccttgatccccttttccttgtccccacggacgaccttgtcagggaccctgaggatgaactgttcctcaaagacgagcggctcgtccggatcggaatccgcttctctcgagtaattccctaggaaactcgtcaactgtcctccttgtaccttttggacctcgcccttgtcgctgaatttcagtttgagggtcgctatccggggtcgattggccgaacgggtggatcgttgaccgacgacgctggacgaggctagaggggctgcgagtcgaccggttgaaggaggtcctagtcgaggaggagcgcctcgacctctcccaccacctcgtccaccacctcctcgaccgcggctcgaaccggttccagcggctcgtttcgctggggctttgtgaccgacggtgggagcagctgcggcataggaagccgttgatggacctggaccggcgttggaaggtccagcgatcggggtgtaaaagtgacccgactctccaggttctctggatgtacccgtcgtgtgttccatactcgagggccttgggcagtcccttttgaccggttcagctatgagagggcgatgtggatgtatggctggatgatctcgatcgatgcgaggtcaagatgagtgtggcctatactctactctactctagtagccagctaggttgcccttgccctgttcccctccttttcctgagactcgtcgttgaccgaatcatcgatctcgttccaaaagttggtcaaactagatatttacactctacaactgtcgaaacggtcgtcgaccacacactacacagcattgctctaggcactgtccaagtataacggacgaaccgcaatgtcacgcctcagatcattacagtcgcctattgtacggaacacgccgtccccctcggcgaccccacctagatcccgacaatcaacatcaaacccttaccctcaggacacttcgacgtatcatcgcaaactccgagctatcctcagcgaagtggatacttgcatggacgcctgggatgaagctgccaaggacgggtttatggcgttgaaggggatcgtcgacgagggaaccgagatggagtgagtgagtcatgggtaaagatcccctcccccctccacacccaggatggattgtaacgtcgctgaacgctttttcaccactctagcaatctctctgctatggaatgctcagtctcgagacctccaatcacaccgcactacgtcgaatacaataaacacatcgatcagaccggtacgatcttgcaacgtctcgtaagccccgccgtccctctcacccacttctccgaccctcccaaccgagctcattgaacatccgtctcaccgcttcgcctcgtttgaccgccgttgcagaacaagatcctagcgaaattacgaatcctgcaagagaccgctcgacaactcttggcagaatgcctgacgctcagaccggtcgagtttagtctggtcgaacccctgtggtccgactatggcgggacatggacgttggagaggttcggtgagttggcccctgcgatactggtctcgtacgatcgggtcattgatccaggccgtcttctttcggatcggggggtttgtcactgcgttcgtccgggggatagtcatctcgctggaccctctggcagcacatcatgctctccatctcttctcactccaaacccagctagaacggatcctccaccctctgaccgccgagacgaatgacaagaacaccactacgagacgcccgaattcaaagtcttccaccgccgcgtcctcggggaacacgacgtttgacgtccaaaagaccgccttggagagataccgggatttgatgtaccgcaacgatcgtcaaacatggaggaccgagtgggaagagttggtagagggcgagatgggcgggtggatgtccatggccggggatgtcgacgaggtcggggatcagcagacggcgggcggcaggtccggggtttcgagtcccggtggtggtgccggaggcaagaagacgaggggagcgaggggagggagcgtcgagcctcctgattgatcgtctcgtaaccaggacaacaaacgatgataatcatacattgacaaccccggcgaattctctggacttcgagagtaagattttcggttttccggcacgatccggcggttcagaacagctgtgggtcatggacaacgacgagcagtcgaattgatggattctgagagatcgatgctggatctaccctgtagaagatcggaagaggacaaggtcgacacgatcgagagctcgagggctgagctcgacgagcctgtcaattaaaaactcagtactggaaatgttcatcgaggagctggtatagcagacggtctttcgcccgcgtttgtgaactgaactgtatgcgcttggatatacgcgacgaccccgatgtaacggccctgtgaggcgtcggtgatggtgctcgagcctgatcgtgggatgacgaaatcttgggaatggaccagatcggtgtcggcaaaagtcctttcccaggacacagtagcgcactcttatcggccgtcgacaaggattaacaaagagactacctgtcaactaggcaccgaggatagggtgaccgaacggctgcaccaatcgctcagacgagacagtgtgagatgcattcgtgccgatgccgaaacgtccgagcaaaaaaattcaccgatcccgggaatctgtgggatcatgtagaagaatgccgaagcgtgctaattgtgaatcaagagataagagcgtcgtccgggtctgtttcatagatggaatgccatttgaacgagacgtttgggaggtttgatcgacgaaacgcggacagatcctcgcgatcacgacggtaattatggttgagattcacagtagtggtgcaatgaaacctcctcggctatcgtcaatggggggcctagatctaccgggtaaggttcgggtttcacggtcccggttaatgatcgggccgctcatcacctgtcacgccggtttcatgactctgctggacatggtcacgcctcattctcaagcgacgaagagccgtacgaagcgggagcgaacgccacgtccaagtcgaccgatcgatgccaagcaggatcaagaggttaggcctctcccgaggctgggggcgtttgccaagcaacataccggtatttcattggggttgcacatggtacaccttttccttatcgcgcttcacggctccgcaaatcattgggagatctgaactcgtgttcaagtggatgccgttgaccggaccggtactttgaaccgtcaaacaggttcacagttccagatcctccgctcagcgggtgtacagtatgcgatccgaagctcggtacgtacaagcgcaaaggccttacctctagcacaaaagctcccggtcgatctcgatgcagcagatcggtatcagttccaggtcataacacgaagaggcgcggaagcgaggcggaaaacgctgcaaatcgacctcgcgccaaggttcgaatgacgtacggtcaccgcatggcaccacatcgcctcggctgttggcgaaatgacccccggtggtcaggaatcccgcgccaagatcacaacaacgcggctccacatggaaacacatgcccagccgaatgaacatcccctccagatcgcgccgaacgatgcgcatcgccgtggtcgtgtgccccggaatgcctgccaactgcgattcgcggttcagggagtgttgtgcctttcaaggcggcaaggagcgcacatcgtctaagcgagagtttggatattttccaatctccccgcttcgggcggttctaccagtcaggagccagtatcgtcgtctcgtcgaaatgtctcgctggccgactgttccactgcctcctgccctctccccgtgttgccccagtaatacacaagcgagccctcgcccacgtctgcctctttgagtacttatctcgacgatcggttggacgcccattccaacaccccttcccctgcgtgtgttcgcccgggagatagcctatctagaaccagactgttatctgtggatatcatcgtgagtgcgaggtcatcactccgtcaagcatatataaacaccacatcgaccctgtgctcaccccgatccggttgttcgctcacgtccctctagtggcccctctgataacgtccccctctaattcaacccgaagcccatcatccattcgaggccgggcacaacaaccatgcacgagcagaagaaggattccgagtatggctacgagcccgacaccgccgtcgtggcggctgtcaacgagaaggactaccgaaccgaccgagcggaagtctacgacccctcgaaagagtctttctggactcgagcgggtctcaactttgagagttacaagcccgcccccggtcacactgggtgagtctagcctagcgccccgtgtgtcgaggcgaaaatgcgctgaccgaccgacgcttttcccctcctggtatttcccagtggccaaatcgtctcgggaggcaccgaagaccccgaggagctcgagaggcgactcaaggactcgcccatgttgcagcaaaagatgaagcctcgtcatttgcagatgatcgccgttggaggttccatcggaaccggtcttttcatcggttccggtcaggccctcaaccgtggtggtcccgctggtatcttgatcgcttggactttgtgagtcgcagcttgacccaacgctacgttagaatgatttgagcgcagtactgatcccaagcgcgcgtcgaccgagcaggatgggaatcatgttgatcaacgtcactcaagctctcggtgaaatggctattgtctaccctgtttctggaggtttctacacccttgctgttcgtttcttggacccttcgtggggtttcgccatggtgagttccggatcggtggcccgtttactagcttgatatttactaacgattcgttcacccctcttctttcgatagggttggaactatgtcttccaatgggctaccgttctgcctcttgaaattaccgctgccgctattactctgcaatactggacgaccagtgtgaatgtggccatctggatcacagtcttctggctcgccatcatctttgtcaacatctttggtaccctcggttatgctgaagaagagtgtgagtaggcgcgcgctagaaaaatctcatcgtcacacggacattggctcatagacgattgtccctcgttgtctagtctggtcatcttgtctcaagttgaccgtcactctcatcttcttgatcgccggtatcgtctttgtctgtggaggtggtcccgccgggtcccgatacgacagctacgtcggtggacgatactggcagaacccgggcgccttcgcgtccggtttcaagggtatctgccgagtcttcgttaccgctgccttttcgttcgccggtaccgagctcgtcggtctcgccgcttccgagactcccaacccccgaaaaaccatgcccagcgccgtcaagcagactttctggcggtgagtccagactctctgcgcgtccatacgccctgagactttcgatggctgattggagctacgaatgtcttttgcagaatcaccctgatctacatctcctcgttgaccttgatcggattgttgattccctcggatgatgctcggcttctcggaggatcgtcgagttacgatgccagcgcttcgcccttcgtattggtctttacctacgccaacgtcaagggtctcgaccacttggtcaacgccaccatctgtgtctccgtcttgtccatcggtctctcttgtgtctatgccggtgagttgaagtgcgaccacaattaagcccggcctagctgatcatggtcgtctcttgtaggatcccgaaccttgaccgccttggccgagactggatacgctcccaagatcttcacctacgtcgacaagtctggtcgtcccctcccctcggtcattgccatcttgatcttcggacccatcgcctacgtcaacgtctcgagcgccggtggcgcggtctttgactggctcttggccctctctggtctctcgaccatcttcacctggatgtcgatttgcatgtgccacatccgattccgagccgcttggaaagctcagggacactcggtcgaggagcttcccttcaccgccgctggaggtatctacggttcttggttcggtttcatcctcctctgcctcgtcctcgtcgcccaggtgagccgtgcttgatcgactatagcccttgcactcgagactgacgcttcctgccgcttcgcgaatacctagttctacgttgccgtttggcccgtcggttacaaggagatgaccggaggcgagatcgcccagggtttcttcatggcttggctcgcattgcccattgtcgtcctcttctacatcatcggtttcgcctggaagaggacccgacctcaccgtgccatggagatcgatctcgacgtaagcagcctcgccggtaccgttcaaagcttcctacgcaaaggctgatactgtctttccacacacctttcagaccggacgaaagtcgttcttgaccgttgaggagatgcgtgcctaccgagccgagcgaagggccgcaccgatgtacaagcgagtgttccgattgctgttctccaactaggcgagcggtgccggatttcttgtttcgaggacaaaaagggggagcaccgggtttgcttttcctggttgtcgtgtgtgtaccctgccgagtcgtgtcgaaaggaggtctataacaaggttgtcacccgttgtcgccgtacagcgcgcacacgaggtgatttgtattacgccgatcttttcttcatattgtaatgaaccctttcgttgcgatcgagtcataatcccgctcgttgcgatgcaatgtgggtcccttccattgcacatgggcaagtgtgcagatcgaatcctaggtcgattatatacagtaagtcgtgtaccgcatgactcgaaacccgatcacggaacccgtgcgagcggcgttttcggttaaaacaaggtttagggcgacgagtcaactgcaccgcgtgcacgctcaaatctccagattaccatcatatggcgtattcacagacatctcgaaccttccagtcagtccactgtgccaacacacgtgtcacacggcacttgtaactcgcagcgtgagatcgaaccgaaagccaatgacaaggattatccccatagctgacgaaaccgatggtagatgaccaccccatactggtccgttccagacaccatcatcagatcgcgagtcgcacctgctaaccgcaaatcgcgccgtgtctccaaatagacacatttgtttgcgatcggattcctatggaaggatgtatggtctgccggatggatcgagagtatcttattcatgacgttcgtacaactacaggaaaataacatccggtctaatcttgacggctcctcttgagtgctcgtccaaactcgtccgtctgaccaccgccattcgaagcatccgtcccagctcgaggcccggttggaggattgaaacctgtcatgcagagtgtttagttagagaggccgaatcaatgtcattcgttcgtggacgacctacccccttgtccgccggacgctccaccggcaccgcccataccgccctgcatcatctgcatcatctgttgcatcatggccgggttcatcatcggattcatcatggctgaagcggaattcaattcagtttcatctcccctctttgaggtatgatcgacccagaactcacgcatcatggggttcatcatgccacccgcagcaggcatcccacccatccgcgggggggggggggttgccatgggattcatcacgcagctataatcttggctgtacacctcgactcgcgactcgtcgtctctcgttcacaaccattcaccacatcacccagatcaacccatacgcactccgaaagtatcgccgccagctcctatctggagtatctggctgaggacacgacaaaaaacggatcgtcgctgcgacgacccaagaaatacgctcgagctcgagatcaaactctaaacgtctcgcacgctcagcgcaaaccacatcccactcatccaaaattcattgacgacgaacgaaacgacgaaccgaattcaaactccgctggtccgatacagatgaaggacgagcacgtatcatgaacaatacctcttcctcccctcaccctgcctcttccagcacttccagcacttccacctcgaaaccccgacacctcaacccgtcgatctcagcgcagaccggctcatcgagagctcgtcaacccggctcgcaatcacatgccgcttcgacatcgatgtcgtcgtcgaacagggtaggaaactcggccttggagctacctcctatcccgatcaccagctttctcgatagcttttcctcgccatcagggctcgacctaccgttgatccccgcgtcgaccacgaacagccaatctacgcgggacgaccttgttacacaacgacgctcccgacagttgctggagcacggagcggaacctgaacgagtagacaagccctttgcttcgcatcagaggtatgggaccgaagccgtcgagtccgtttaccgagcaagagtgagagagtcgagtcaaccggaatcgacatcgtcctcgttcaggtcgtacacgtcgaaaacacctacctcctttgagcccaacgatgtccagcggaaccgcacttcttcctccactctctctttcccggatcgcgaggagacttcaagcgagagtcgggcgagtctggatagattacctcccgccagggggatggcgcagcatcgctcatctccccgtcaaacaacgttatcgcattcgagaccgcacgtccgagcggatcatcctgatctccaagcatcatcgagctctcaatccgatcttgcaaagacccagcagacgggcatgttagtaggtggacgacgtgctccgccagagaggttggatctagcgagtccgagtaaagatcgatacagggggttggacggaccggcggtcgagaggaggagggtggtcaccgaaccagctcaggtgagtcgtcaagtcgtctcccctgatcagctgatcagctcgaatgagacctgttggctgatcctacgcatacgctcccgatcggactatcgtagcaatcgtcgggtgggttccggaagccgtactcgccccagatggtagatccatattcgggcgcgtcgagtccaggatcgacctcgaccctggctatcgggacgtcgcacatgtcgtttgagcgtgggtcgtcccgattaccgctttctccatccttgccactctcggcctttgggttcggaaacctcgactcgggcaagggagaggtagagggggaccaagcggggctgccaccgatcccgaggagtctgagtatgggtctgacgagcgattcaagcgtaggggacaagcagaggcagagcatgatcgcgcaggaagaggtcgatacgagagggtcgtgagttgatccccccggctcgaacgtttcatcactatgccgagagctgaacatgaacatggtattgccgatgacagggtggactcgtactacacgagcaactcgtcgccacgtcgactggcgccttccggttcgtatgcccacttgcgcactccatccgccaagttctcgtcgaccatgaacccgcacgcctatatgcaatcgccctcgacgcccggtcctaccgatccgtccacgctcaacagggacgatctggtcggtgtaggggaactatcgacgccgaggtggaaatcgccaatgaccatgtaccagagcccgacaggagtttacgggcaagacgtccggtcggccgtaccagagaccgtctcgcgcaaatctgctgcgcagaaacagctgtgcataccctcaagacgtacgaaatcgatcgcaaattcggaaagctatgggagtttgatgttgggagagaacactgagcccgtgccggatctccccagtagtgtgaccatgccgccaaccgccactatgggcggaactttgggtagacatggaagtggacgcgttcaggggcccagattaaggatcccaagcggaccggcgggtcgtgttgtttcgggcacgagatcggcggtgacttcgacgtatgagccccgagcggatggcacgaacgaggctagacgggccaaccttccgccgcaacttgggctaggcgtcaagcttggaggggatcacgcgttggacaccatgttcctccaggatgatcctccagaatcggaccgacggcaggatcatggcacaaatatggcccctgaacgagtcgtcacgccccctccccgatcagtcatgttgcaggttgatctagacgattcgccgtcgagcctccgaggaactcgtcggtattctaaccgggtcgctgctgaccttcaagccctcaagatcaaagaggccaatcaatttgctgcgcaagctgtggtacaggaaagtgacgaaaagaatgcatcgaccaaaatgcctacgttagactcccagcccaacagcgcaccgggatccaactattcttcgccgaagaaggcaaactacccgaccgatcaggccggccggccgagactgctatctgaagcatcactcgacaaaaatggattccccttgcgtccgagcaaaagtgacctgcgcaagactcctccatcgggttacaagcgggagacaagattgtctacaagtcaggcgaaatctcccaacgaatatcctcatccgcagactatcctcaaacagctcggctcgcaccgcgatttttctcatctgccgcccagcccatcgtccgcctcgatcaacaagttcatgatgcgcgaatcggcctcagttgcatcgttctcacccgtctcgacgcctgccgacaaggacactggctatccagcctacccgtttcctgatgtcgtacacgatgaccggccaaacgcagcatctgatcaacaagctcgctcatccagacgcaggcgagatgtgcaaggggaaggcgatcgaatcctggataaggagactgtggacgcgctacgaaagctggacgggttaggcaaagcaagttctaacagtctcaagagcagagctagacaagactcgaccgttcatggacacggcgatcgagaaacgccgctttcccgtgatggaactgcatcgggaaacaaggttggcggtgctgatgccccacgaggtcggctcatcccgagtgtaccttcgtcgcccgaaactgccaaaacaaagtcacgaggcacgtccatagggtcgaacggacctccttcggttacagcgatcggttcgtccctggatcaacaggtcgagacctcgagaatcggcaatcgatcgagctacggaagttcgaccggcactgacgatgcaggcctagcggtggatggtcgcaccgccagtgttccgccggttcctcctatgcccacagattacccaggaaagccaaccggtatggtcaagtcgcccaccctcgatagattgcctcgacccaacgagtatgcacgcgtcaaggattatcctggccggaccatgctcggatcagagaagggcatgacacattcagcctcttccccagtcctaagctcggatgcctcttatcattcggccgatagcaggagtccagcaatgtcgtcgttctcggcatttgaatcggtaggaccggacggttcccgtccccctcgcgtgagcaagaagtggtccttctcctcggcactgaatctcggatcgcatggccagaagagcaagatggcaccgtcgtcggcgacgacgtcaatcacggatactttcccggtcgtcgacgaccttggggcggtttcagcgggagatcccgccggacatcacggcctgaggatgtcaaactttgagagaagagaatctgtagaccagaacagtcctggattgacaaagaagcctttgccaccgaccgacggcgatggcggtttgacggtgcctgtggatctccgtctaagcggacaaggaaaacggtccacatcttctggcatcccgttcttcaggcgatcatcgtcttcctcgtccaacgccatgaacacggcaacgtcaaccaagaacggctcgaatcagctcggaagagacgtgcatataacaggaaccacgaacaccaattcgcagactaatcgaaagaccattctcggtgtcggaatgtcactgctcaagggaagtagctcacgccggaatctgcagcgacaaccaagccaggagcagctgcaagcatcggcaggcctctttgccgcgactgaccgaccaaagcacgaaaggaagggcagcctgggctggagcagaaaacggagcaaggtgagtaccgagaagtggcattttcaatgtcaagagacgccagttcaagcctcttttggcccctttccgttctcaggatccggaggatacacgtattgggggtgtgctaccgtccgaggttgtaccaatctcaagggactcgggaactttgtcgcgcacgtcaagcatacaacgacgacccagtaaggagtccatcaatgcggcctcgctgaacccaactacgccgattctcaaccgatctgctctgcctcgggcaggaccggcagctacgatgcagacgagcagaagcggtcttctaccgtcgatcgctggatcaccggtcatacaaaacaagaccaaggccgcatccccctctccttccgtagctcaagctcaagctcgcacgctactgtcagccactccgaccaggatcccaagaatggccagccggacttctctggtcaactcggtcggtatttccggacaggctcctccgctacctggcaagtccacagccgtcaatagccttccggcagcacgggagcgtacggttaccggccccgctgcagtatcctcatcgatgctagctgaactcggctacagtcagcccgacaagactcgagtagggtcgcgtctatatgcaaagaacgggacgctcgatttaccgcggacggatcaatctccgacgagcgtctcaggtcaaagtggacctttgcccagtcgagcctccgtcgatgccggcgatagtgctcagaagaggaatttgcctatgcccccggatagtgtggatcctcacaagacgctgaaagccaaagggcttccgcgggacctttccagtagctcgctcaggcgcacttcgttgactggtcgggaaaacggaaatacagctaccggcagtcccactgcgacgcccagcaagacagacaagattccaagtcgtcttgcagtgcccggttatgctaggataccccactcatcatcgacttcgaacatgtcgggtcgttcttcccgttcgcaatcaccacaaaccagcccagtagacgaggacgagctcaaaggaaatgacgagatggcccaattcttccgtcgtcagcggtccaagcaggcccggggcgagatcaagagtcctgaaattgaagcgatgctcaacttcccagacgatttggcaccaggcaaggaaatgtcccctcacggtaagagttcagactgtgatggacgagatgcaaaggagctaatcgattaatctgctcgtcatcgaatagctttcatcaaggcacacttcgaatcactgtctctctatgagcgtcgcgagattctggattaccagtcgatctggtattctggccagaaagacaaaaagaaccaggctacacctgagtctacggtcaacaatcatgggtacgatgacgaaagaggcgattacatccacatacaaggcgatcacctggcgtatcgctacgagatcatgtgcctcctgggtaaagggtcttttggccaagtgctacaatgtcgagaccacaaaacgggccagtgtgttgcgatcaagatcatccggaacaagaaacggttccatcatcaagctcttgttgaagtgaagatcctggaaaatttggtcaaatgggtgagtagccaagtcggtaccacgctgatattctatttggctgagaaatatttctaggatcccgaggacaagcataatctgatcaagatcagccaacatttctacttccgtggtcatctttgcatcgtcaccgaactactcagtatcaatctctacgaaatggtcaaggctaacagctttgtcggcttttccaccactctgatccgccgattcactgtccaactgctgtcatccctgcaagtcatgcggaacaatcgaatcatccattgcgatcttaagcccgaggtgaggcaaaagctcgcaaggcgttggcgaaaagcccgctaattctgactttgctgcttatccgcagaacattctccttcgacatcctgctaaaagtggcctcaaggttatcgatttcgggagcagttgttttgagaacgagaagggtaggtcgatgtgtcagccggtaaaaagcccctgtgcttgagctgacaccctacactatctcgtaatccagtctacacctacatccagagtcgattctatcgatctcccgagatcatcctgggttgctcctaccacactgccatcgacatgtggagtcttggctgcatcatcgccgagctcttcacgggcttccccatttttccgggagaaaacgagcaggaacaactcgcttgcataatggaggtgctaggcacgcccgatcggagcatggtagacaaatccaccaggaaaaagaatttcttcggtaaagtcttgaacctttgacggcttccttagtgctgctgctgatcggtgtggtaaccgtatagattcattgggacaacccagaatcgtcgctaactcgaaaggcaagcggcgacgacccgggaccaagacgctacagcaggttttgaaggccgatgacgagcaattcgttgactttatcgcgaaatgcctcacgtgggatccagaacgacgtctgaaaccggcagccgcaatgcggcatccctggataacgggtgcccgcaaattggcggcatccaatgcgccgtctgccgctgcggttcattctcggctgtcgagtatcagtgcgaccccttctcgcaggtctggggtaggcgagaatgggaaaccgaggatttctgagccttcacccctgactgcccgtaagacactttcgggcttgccaacctcgtccagtggcaactttgctagccaaagtagccggatcgctcgaccaacgcagttcaattcgtcccgatcaatagcacaggtgagttttgaatcgcttcttgaccagacccgtcgctgacttatgggttgatatccacttaaaactctctagactgccggacggtaacaccatgacctttatgaacttttcacgaaccattttcacgatttcaggacagccacacccaagcccacccccacgagatctaattttctgtgcgagcacaagtagcccgatattcgagccttctgctcgcaatgtaattccttagacgcgcttcacgatttccctcttcgtcgatcacgatgaacaacgattcgcacgctggacccctcgtctatcacaagtcctggcgtgactcagaacagccggtgcgactggatttgcttgcatttaagatatggttgcatctgtataaagacaaagcagctaatgaatgggatgcgtggactcgcacactttgggtcgacgcgtcgacatcacgacgcgacgcggaaaccgctttcgcaacccagatgcccagcagcatcgttttttatgcatcgtgcaaccatttgaacacgacttgaccacggctggaaggtgcaaggcaatgaacaaacttcgttcacatcaagatgtctcatgaagaggagtctgaagcttttgatgtagctggtcaagctcaagaggacgagacggccatgcaggtagacgcggatgtccgtgagtagagatccagtcactttaacctcgttttcgccattctgaatcgagagtgtccgcgattgcgaaatcatagcctcgacaaagaccgccgcaaaagggaactcgagaaagacagtgcaacttcccgatggtcaacccgggaccacaacattgccagttgcgagggttcagcggatagtcaaggcggacaaggagatccagatggtcaacaaggaggccatctttgcgatatccgtagtgacagtcagtacaatatgattatatagctgttggtgatttactatagctgattatgtcctatccggtgcccatctctcaggagcacttcatcaagaggatgacggaaaaggcgtatgaacaagcgaggatggatcaacgaaagaatgtaacgctaaaagacatgtgtgagtgatcacctgccagggaatgtacatctgtacattacttgatcctgatccagaccaccctcctgtatatagcgaccgccattcggaactaccccgaattcgacttccttaacggtaagccgagccgactcgatcccctagcttgtctttccctagtcctccccgagcttgcccgacgaccaccttgatcgggaatgatgacaacgccaacgactgtccgtggacgagcgaaatgatgagatcaaacgtatcaaatacatcatccttatacccagatggaggcattcgaccgggctcccccggttgctgaatcgcgtgcagcaatgtcgtgagaaggcgagagggggatttcgttcgattcgcgctcgatcgatgaaggagaaacgttcaagggaaaatcttctctctgatcgctcggattgcatgggacgttattattatcgtcgtcatcgtcgtttgggtcggcatgggcctgacagggaagcattaccggttgagcttgaccttggaagctgattcaaacaaagtcgatcgtcttgttgcatgataggcatcattccggagactgtaccattgtcggtcgctctcgctgcccgggcaaagaagggtgagttccgtaaagcctggccttcattcctcgacccgccgatccgtggctgtcgattgaacacatacccataccttctcgtcacagccgccgaggacgcggaaggacccctggacgagtcgacgacgacacttgcggatatcatgcccaagatcccgctcttcccaagcacggaccccgagtaccccgacgcgctcgtcaagaaggctccaggggggcacccgaagaaggcaaaagcggtcgtggaaaaggtccaagcgacgaagagcaaggaaacgacccctgtggtagctgctgtgagtctgctcgattcttatggtctcgtgaatctgcttgtctgacgggattcggacgggtcatcgatagaacccaaacgtgaggacatcttcgcgagcgaaaaagcccaagggtgcggccaacgaggcagaggttgaaggcgaggaggagccatcgtcggatggggccgaagcttagacgatcagaatcagatggttggtgagatgtagtggacgttacgacgagagggacgacactggtgtcccctgtattgtacctggtaactcgcaaggaattgtagcatgcagcatgatctgtactttcgcaacttcaacatttggcggcgtgcaccgcggatgtatatttgatttccatgcgcgcggaggctaaaaactgatgcaatctcggctgacgaggtggtagtgatctcgcccgctagctacgggtcgctagctcgctagttggaacgtagcgagactgtgatgagtcgcgggtagtaagattaccgactaggcgacaggcgacatcggacttgtattcgtttgtgctgtccatccaaacggacctctcgatctgactgctgctcaaactctacgtgatcctgtcgtcgtccttttcttcggtcccgtcggccgggactagggcagcctagcctgagggtgtttggctggctgactctactttagcgcgggctagtcgattggctgacgacgagtctctggtcaaatctaggggctcagggacgaacccaacccaccaaggggggaattgcgaccaagtgaaaacagaccagtatcacctcgtcgtaccagagaaacacagtcgaaaacgatctggaccgcctcgctcgtcgttcgacgtatcccccaagggtcttctctctcaatagtctcgactcgacctttctctttcttctgttactttcacgctcctatctctctcgacatcggcacgggagaaaaggagaagggcctcaatatataaacacgtacccggcgcctcgatttccgctcgctcttcccgactcttcaggtcgaggaaaacatcgtgtccccttccaatcattcgtcacgcaacccggtcaaaccggctcaggtcggcgctctccctcttcaacaagagagccaacaacccgccacttttcccttgaacgacgcctcgaccccggggacctcgtcgtcgggtccaggcccttcgagcggaccaggaccagcaggtggagggatcggtccagactcgggatctagagcgaaacggcaagccgctcgttcaggtcttcaagtctccagaagcgatcaacttcctgccggtctcggcccctcttcgtccacgacgaccgtcgacgtcgacgttaacaacgaaggcaatctcaacgggtcgaccaccccgctaggtttcctcgcgtggtcggtctctgggatcatggcttcccttctggcttacggatggggaggctcgctctggcgttcaaagacgatagacgaacagctggatgaaatgctgttcgggctcgaaggtgaaggtggatcgatccaggccttgtcagcgggttcgggcctgctctatgggtgggacatcaagaggttgttgttctggtggctcgtcttggtcgtcttctgcgttatcggtgagtgaagtattggacaggatgtcggctagtgagatgtctagctcaccctcagccctgcctctaccggatagccgtcgctttcaacccgaatgagacctcgttcaggacttatctgaacgaacaatctttccggaaacatcttcaaggtctgcatcaccaggagaccggagctgcctctttgatggggaaagatgctggcaatgggcatggaccagaagattcgagcaagaacaagcatttcgcttcatcatcgaccggcgtgtcgatggcgtcctcgtctgcgtcatcatcagcatcagcgtcaacattgttaccctcagcatcaacttcaacttcaccatcttcgacgtcaacggcatcaacatcaccgcccagtaatgtcattacgccgacgccgttcaggttttccaatcacattgccgtctcgctccgaacacctcagtatcacttccttcactcgtatctcttttccatcgtatggatcttgcccggatccgcttacacgggcaacaacaagaagactctacatgcgtccaaatcgacatcggcggcgtccagttcgatcaaatcgacatcgtcctcgaccacgttcgggatagacggcgaggatcatggggagggttatgatccgacgttacagggggtctggtatttcggggctttcgggaggtggtggaatatgggcaggattatggacgatcccgcgatcaggccgtggagtaggaagaagaaggaggtggctgctgcagcgggcgaggcgggcaaaagggaaccaggattgatcagcgtcgtggcgttgccaaaggacgatcggtcgcctgagtgtgagtcggccgcgatgatcgcgatgtctgggtcgtgtgaagtgtcgtactgaccgagtggttttctcgcttgggcatgactctagccaagactgcaccctcgacaccgcttcgtcggtcatccgccaatacccccatctcgcgtgcagaatcgccgccgccgttgcgtgccgatgtatcgctacctctgcattcccggacgctcttggacccgacgtttcccggcaagacttccctctcttcttctcatcatctcactgtaccaccaaataaagactcggcaaacgacaccacctctccttcttcccccttgaaaccggccgagtcggtcaaaaatgactcgcccatgctagcggaattgagttccaccttgaccgcggcccaagccacggtgacggatctgcgggaacagctgaccgcgttcaactcgacggtcgccaactctcaagctcaattgcaatcggccgtcgacgaattgcgacgaaagaaaaaggacgaggatgcggatcgggcggatctcaaggtcaagatgaaacatctggaggagaacaagcggcaggcagagggtgcgaaacgagaggcggaaaagaagctcaagacggcagtcacgttgcgtgatgcagtcttggagcggtgcgattcgatgcagcgtgaaatgacgaggatgcgagaagagatgcaagagtacgaagagctgatcaaggagagcaagatcaccactgaatcgcatgccaagaccacgggggatgctatcgagcaaaaggaagaacaactgacgaacctggacgaggatttggccaacgaagtcgcggagaatgccgatctggcggccaaggtgttgcaagcggccgagacgcttcaggcgttgatcgatagcagccctcaacccgcctcggagtatggcaacgttcctacaccttcgccaggggaacaaggacctggcggtttgtcgggcgggattggtggtcaacacacgccgtattcgaatcgcatgtacaattctgcctactcctttcccgatacgtaccaaccgcttggacctgcgctcggacccgctcacccggctcagctgcatcaacaccatggcgggcacggtggcaacactcaggggcaagagtatcgatcattttccacgtcgggcaacgtgtttcgtaggaccgccagtgggaacgttacgacgacgagcgtgccggaacccatgtatcgtcagagctcgccctttcgggacatctcgggatacgaagggttcggcccgcttggcgctccggtccaagggttctcggatgggcatcactcgagctttctcgagccagaagaacccgggtcccctaacgttctcatgtcgtcgtcgttcaccgccaatctgttaccccaaggtttgtttcgatctctcgagggcgatcaaacgcctcaagatgtcaagaccgagctggacgatcccatggacatactggagctagaccctgccaacctggaactgcccaagtcgcccgagaagagcgaggaacactcgggtcagactcccaagcccgccgcttcggatcccgtttcacaggatgtcgattctaccggtggtcaaggaagcaaagagtcggccgaggatccagcttcattgcaggtctcgctcgacgaggcttcgcgcaagttggccgagtttcacgacgacgagactgacggtcctcgtcctcgacgttggttctcttcttccaagctcaagggacctacggatggtgccgtcctggagaatggaagtgcgggacatctgaacgatctgttcggcatgccgctcgctcagaccatttccaatgagagcctactcgtccctggaggtggattcgacaacaaccccttcgctccctccgccgccgagaaacgagcgctccgctggggctcgatcggcaaatgggccggaggtgcacgccagacttctgctccccacgatgtcggcgggccgtacaagcagcacctcggatcgttgcccaactcggcccgagcgagctcggtcgacctgaacaacaatggcgcgagacaggcttgggagcatgcgggtccgtctgccatttcgagcgtgatcggggcggtccctcaggagaaacggtcgttcaagctctggtccctggggaaaaagtcggcaaaggaagaaccgggatcggggtcgagcatctggaattaaaactggggtcgtctcgtccaggccgcgatcgaagaaccctcttgtgtcacgcgagggtagtgctttgtgtcgttcgagccgtgatgtcaaacggatcttctagccaacttgtgtcattatgtctctttgattccatccatgtgttctcgtcccagtctttaccctacgaatccatcgtttagaatcggtcgctgttccgttgtgagggtgattcctgttggcttaaacagtatagttgctagtcgtagtgtagcaaacagccttgttgcctttttcgcggatggagccggtttcgtgacgcaagcccgagccaggggaaaggacacattttacagagtagaagcgaccatgagcaagtgatcataccgacttgattctggccacaccggtcaaggctgtacaactagccccatcgatacatatacaatcgctggttactatcctctgtccaggaagacagaaacacacagcacgaaatcgcacagcggtctggacatttcgacatgagcgtcgtagcgtcccgatcgatccggcctgccatgtccatcaggcgcctacagcggtcatctctctcgaccgggtttcagctctctctggcgaaaggtattgagcgacattcaccttttgcacggcctctcgcctcgcggacccttgcgtccgcagtcgaactgccctccaagctctcgccgacctcgaagcaatcctacgcgaacaagatcgaaccgttctcttccaggaccttgcccgaaacgaaagctttgctcttgatcgctgttcccactccaccgaaaacctggggtggtgtcgtcgagaaggaagaccttgtcgtaggggctgccaacctcgacaagaacctgagagaagcccaagtacgcatactcgcaacgtatgaaggcggaacgacctactcggctcgattattccgtccagacggtaccgttgcgcacatcaaggacttcagcgaagctactctcggaacagagagcttcaaggacctcgtagatggcaagtcttcggaactcaagccggcggacaaggctgaggtgatcgtctgcacccacggggcaagagattgtcgctgtggagatatcggtggagacctggtgttttcgctgaggaaagaagccgaaaggtctcaggggcagacgatagtatccgagtgtagtcacgttggtggtcacaagtgagttgaagcgtacatggtcgacctactgcagtcgctgacgtgaccgcactcccgcctcagattcgcagcgaatgccatactattgccctcaatgcacatgctgggcaacctgcgaccggaagacgcatcggcgctcctgaagcacgtcgataatctggaaggcaagggtgacggacctgtcgatcgaaacatgtgggaaaatttccgcggcgcgttcggaaggacgatcggcgagcaggtcagcatgtacgattggaacactggcaagaagggcgaggtcgaggtcgacgatcgccaaacggcatgtgagcttactcgttgtggaggccaaactaaattttccgtttgacaattgttgacaacatcccaacatagctttctcgcctacacctcggaggagatctcagcaaagtcgagcttattcgaccttttcggccacgaccttgactcgggccactttcagaaatcgtcattctggcggtcaatcatcacgtcgatcgtattcgacgggccctgatagcgagacgactggggaggatggcaaagctaagggagtcggcaacaagctgaaggacttgatgaaaaagtacggacgtcacgctctcggtgtctacttattcctctcggctatcgatttcggtgtcgcctttctcggtgtccatctggtcggagctgagcgactggaggccgtgaaggatatggcgatggagcaatggcggaaataccgacctggactcgagacggataacgagttgatcgacgacgccacggacaaggctggcaaggccgccatggaggttctggaaaaggctcaggaaggcaaggaggccagcgaagccggcgctcctactcaaaggaagcgcagtcgtacagcgatgctttgggctgaggccgcattggcttataccattcacaaaacattgttcctgcccgtccgtgtcggtttaacggcagcatggactcccaagctcgtcaagtggctcacattgagaggctggatcggcaaggtgaagcgtgactgagattaggttccacaacgaatgtctgctgacgctcagcttggtgctacagggaggaatgggccgtgctgcagcgcacgcacaggacaaggtgaaggacgcccaggccaaggtgaaggaggctaggacaaggctttccaacaaggccgattgacgacatagatattccaccctaatgtatcaatacatcatagttggctttgctcaaccgacaaatctactcctgaatccgatcgttcccccatgattctgcggctttctttgttcccgtgtgtcaagattgatcatgcgcttacggttcaagtcttctctttccacatcacaagccttgatttgggtttttgcgaccactgagcccctgcgatgtacgggatgtacccttcgagcgaggtacggtacatcttctctcacaggccaggtcatgaatgccgcccctgtcgaagacccgagcaggagtcgcgatgactggaagcaacaaggcagctgccaggcgttgcaaaatgttaaagaagtggccagggcacggcaattcgaaggaacgccggccgaagccgaaatcactcgggaatgagccgcactcgatccatttcatttcaaggtcgatgactggaccttcatagcgtttcaattatcgcacacattcaggctgatagtgactgagttgctccgtatcgtccgtagctcatgttgagatcactttcccatcggaatagaacctacactacactcccgagaagaacaatggcttccatccaagccaaaccattcaagctcgcactcgtacagctgggcggattgagcgatgacaagacgaagaacctagaaatcgctgcggccggagtgaaaaaggccgcctccgaaggcaaagccgatttgattgttcttccagtatgctcaaataaacgtccttcggcaggatgatgctgacatacagtgttgtcctgatcaggaaatcttcaattcgccttatgctgtcaccgcattccgaaagtattcggagcctatccctggcagtcttccggcagacgctgcttccctaatatcggagagcacgaaagctctgagcgagatggcgaagaagaacaaggtctggctcataggaggtatgccaaggcaatccagactgacgcaataatcgaggctgaatcaacgggactgccctcgcaggttccatcccggagatcgagagcgagactgacagtatctacaatacgtgtaccgtctacaaccccgagggtaccctcatagcgaaacaccgcaaagtacacctcttcgatatcgatatccctgggaagcagactttcaaggtgaacgctatacaccgaggctcgatcactcggctgcagacatgctgatgtgcctccccacatccgtaggaaagcgaaactcttacgggtggaaccactttaaacacttttaagacaccgttcggaaagattggcctagggatttgctatgacattgtaaggaagagacgaagccggcggaacctgatgggtcgatcgtgctgattggcacatttacccacaagcgtttccccgagatggccatgatagcagctcgtcagggggttgtggctatgatctatccatcagctttcaagtgagttctatgatccggtacacgttgatatgcgcttggctgactggttcgcagcatcacgactggccccgtctattggactttgctgcaacgagcgaggtatgtttgcaagcttgatcatggcaagttatgcgatactcgcatattgacataagacccgcctcaaagagccgttgacaaccagatcttcgtggccatgtgctcaccagctagacaccccggtgcatcatatcaagccgtgaggaagccgaattaagtatgtaaaaatgccgcaactgatcaagcatatttacacatccctgcagtacgggcactcatcggtcgtagctcccaacggagacgtcttggcggaagctgatgagaatcctaccattgtttatgctgaaattggtgagcaggcgggccagggcatcttctcgtgagaccgcagggactgacagcctaatacgcaaactcagacactcagctgttggagagcacgaggtccggactccccgtcactattcagcgtcgcttcgacgtgtaccccaacgtagctgatggccagtgagcgtgaagtctctttgtttcgtctctatatgcgtgatattgcatgactgcgtaaaatatatcgtgaaactcacgcgcgcatggccgggcggtactcggaaaaatcgctatcggatatgtcatcctcgttacaacttaacgattcgagcagatactcaccttgaccgcgatacattaagtgtcaaggtagaactacgtcattgaatcaaggtcatgtgatatcacggggttcccagacaaaaaggggtctagcgggctgctggcgtacctcctcctggtcaaagctggattatccgaaatatctccactagacagtcatctccccggtcgccaaaccggcagcatacgcggcggattcgaatgccaacaagcgccagatgtcgttgacgacctgacttgcgtcctcttccaagacctgtcacacgccagtcttgtgtcagcaatagaatggatcacgcgcttgacccaaatacttaccggctcaagggtttccagaagtacctctggtccagcctgttctttgatgtgctggatgacagcgttagacaaatcttcctcttgaagaccgagagccgtgtcgatcgtcctgcgcacaaagggtgcaatcttgttctctagttgagtctgttcgcaagctaaacgcgtgagaacgggaaaagtaatcatagctgcgatagtcgcctcacagtgattgcggctccccacttgattttggtcgcccatagtgtcgcttgatcggagggaatggcagccttgatggcacgcagcttgtcctgatggcgctcgtcccgttgtgcgggcgtgagaccctccgcgtcgtcgagcataatcaaagtcctcttcttcttgccagcgtcatcgtcgtcatccccgttgaacgcgatattcgtcttttgcttgctggcggtaggcgcagatccggcaggaccaccaatagcgaccttgatgtgcgcagagtcatcgaagaggtagccggcagctcgttgttttgcttcgaggtccgccatctcctgcatctgcttttgcagcagctcttcggtctgcttttcaagttcaaccatctccaattcttccgcttggcgatctcggacatcatcctggtattcccgtcggcgcaccgcttggcgcatgctcctccattttcctctgtcaaagacacctttagcgttctcgttccttatttgtctcgtttgggcaagggacttcgactcaccgatcagcaaagaaaacgtccctcccgctagcctcttctcggtcgtcatcgtaatctcgaagcatgcgtctcgcacgctctcgcgcgtccctctcgtaatcttcttgacgtttcaaatcatcgttctccttctccagcgttctcattactcttgactcgcgggcctcaactcggcgttcgagctttgaaaggtagatgagctaagagctggagggcaacgtgacgattgactggcgacttacgtttcgatggtcctcttccagacggcgctgcttttcttcctttctcatttgttccgcctcagcgtcgctacgctcttctcttccacggccttccgttgtctgcgcccttacgaatccgacgggctgattgtagccctgaggtccatctccgatcggccgaacgctctgatcccttcctccccattgtcgcatttgattaccgccctgaccagggtgtccagcgttataagatccggagccgctcgaacgagagttaagcatctcgtccttcctctttcgttcctcttccttcttctgagcttgaactcggaaggaagcaatctggtccagtacgacaacacgctgctcctccggcagctcctcggcgtccaggtctttcaaatgatccgggaccatgggcccgttgtcctttgcagcatcgctgacattgggcgcggccgaagcaggaatgatcgaattgagatctgcattcgggtctctcattgcttgtacgattgtttggattcgcttcctggcatgttcgtcgagctcatcatcgtgctatagtgagaaaattcaattttgagacgaccaaacggtgaaaagtgtatgatgcgctgagaacctacgtcggtacgaatgttcagctcttcaaactcgtccaggaaagctctcgtcttgtcatctgccttgacctaagaccgcgcaaagaaggtcaggatccctccggcgcgctgtccacaagcttgcttcactcacgatcaaagatttggttttgccctccgctcgacccgcaggcgtcatgtcaggcaattcggttccattcaaacatttgaggcatcgcaagacgacttcgggatcctcgaactcggcgaaaccgaaggccgcaagctgacccgaggctgccgttactctgtttagactgtgcaagggtccacatgtctgggtttcgcgaggcaaaagtcgttatcagggtgtgactgcatagatagctgggctcctttggataaaggtgtgacttacgtggatcaaacccgtcaagatagcatctgttacgcctagtgggataccaccaataaatactttcgtcgtcttgacggcccgaacaaagttggggttctgggatgcaccgggcatgccgggcatgtgaggaggtctggggagacctgcattgttcgggtcaaacccgggtgatcccataccaggaccgccaggcgagaagccgggtcggccgggtaagcctatgccaggtgtgggcatctgtcctggactgaatggcggcatgttcccgggggaagggactcccattccctgagatccaggtgtaccttgaaagccaggcataggaggtctcgtcggtgggaagttcggcaaggtaccgggcatagggggtcgaaagccgccttggcctggcggaaagggtggtaaactgccaggcatggggttcagtgttggtggcggcattcctggaagcgtcggaggtggcatcccggcaagtggtggtcgaaaaccgccagtctgttgcccaggaggcatgtaaggtgggtacccattttgaggagctgcttgaatggcgatcgtaaggtttttgcgcattcttccgttaaatgagcacgcagctagacttacgatgtccgttatacatcctagttctctgtacgtaagtaatctcgtctaggctgtattttcgatttgagacccggtatgagcttgaacatgacctcgatcactatcaatcttaccctcgattcgaattcgaactctaggttcgacttcgagtgagttagtgagtagctgagtagtaagtcaaatcaagcgcgacgcgcttctagcgagaacgagctgactactatgatgatgatcgatatgcgggttatgatgtttataaaaatggtatgaccgtctcttttgacgcaaggtgcgttcatgtacaacatagataccatgtcaggtcaagaaacaggctgggtagtagtttttgggttctgttctattctatctagagaaatcctacttgaaaaaccgaccagtgttgagacgaggtgacaggcgtacagaaacaggaaagggaagaagtcgacgtctgttgttgaaggcgtcaagaggcagtcgagctatagcctagagcttggtgggagaatagtccttgccatccctgtcgtcagtagcgatcttctgatcctcgtaaggcgagacttcgagaggcgcggcgtgttcgtcgacattgggttgaggtccagagtagtgcttgcgagctccagcgatgtaccatataccagacaacaccatgactccgacggtgatgacactggagtaattcatgttcaaggcagtgataggctgaaccgtagggaaggcgaggatgatgacttcgaaacctgttggacgcggtaacatcaaaagttagtattcaaacgaatcttgagcgagggtatcatgcttacaagtccagacaaccatgacgatgttaacagccagaccccatttgcccatgtagaagggaccgggtttaaagttgacatcgggacggtgctaaggggtgtcggggcaaaattccgttagcgtctggtcccggctagctagcaagtttcacattgcttacctcaaacaatcgtcggccaatgacggggatagtataagacagatccagggctagagcacacatgctgaagatggcttgggaggcaacggtactggcccagtcgaggcagcccatgaggatggcgatgaagatgaccaaccagacggaccagataggagtcttggtgtacctgttaactcgaccgaagagaccgcggtcaggcaaaccaccgtctcggctgaaggcgtagaaagttcgggcgttcgcctgagtggcggtctggacggtaaagaaggcaaccaggcagacgaatggccagatgactaaggcgccggtcttgcccatcctgttggtcatgatttgaaggaacgcggaaccgcttgggccagggagttcggccagatctccggagcagaggaccatgaccacgttcaatacccaaccgagcatctgaaagaagcgcagaggaacacgtcaggcacgattcggtgtcaagttggcttgctggacttacaccagtaccgataacggcaacaaaaatggctacgggagcggcgatggaagctttcttgacctcctcactgatgtgggcagcagcatcataatccgtcatctatcggaatccagttgtgtcagcgtcgtagtgagcaatgatgcttgttgacatggtgagtccagcgacttacagtccattgaacggaaaggaaacccaacatgaaagccagaccgtcgctttgccaaccagtttctaatgtgatcggtagtcgggccgtcccatcagcctatcgtcgggaccaaataggcagaagcaatatcttacggttgacgacgtttccgaatacatagctggccggatgcatgttggctcgtccagtagtggccaaaagaacgatgatgatgatcagagtggcctgtgtggtggcacagatcagtacatatgtgacagcgatgcgaacagctggaaacgtactccaacgttgacgaagacgaaaccttgggtcaagaaagcgagatccttggtcttgagagagctgccagagaaatctagcgtcaggtggcgggtcgactggtcacccctcgagctagtctcacttgaggaatccgtggacgataagcaaaccaacaaagagtccgaactgcattccagtggtcacttcaaagtcaccatcgaaaccgatagtacatccggcccctgaaaagatcaagaggtcggataagtgagtcaaagcgcgacggcctcgcgctgacccgcttcgtataacgcacaaatcatcctagcaagaccgtactcggtagaggcgacaccggcacattgtccgagcaagttgagccaaccgacaacccaacccgtgctggtaagattgcagctttttagcacggagatcctgactgaatcggaggcgacaagaggaaaactcacatcgcacggtacttgggcgggaccaagttggcagaggcctgtagatgcacaggatgagctgcgagaaccaggctgacgactgcaaagtggcttacagtgtagagaccaccgctggtcgggtacgcggaaacaatctcggcgatcgatgctccgagcgagatgttcactgtcgacggtcgcatcggtcagcttcgagtgacagatgtaggcgaatggatcgctagtgatttacagatggctccaataagccaacaccaaacgaccgaggcgggtccaccagacagcaaaggggtattgaatgtagtagcgactacagaccggtgaaacaaggtttgacaacttaatcagcgaggactgtcagccatcattgagcaagagcatactgactggaagagcacattcccataatggaaaaggcaaaggaaaaggtcgacaagctgcaagtcgaggttcgatgagtggggattattaggaggcgtgacatcctgaaacacgaatcccggccactgactttccgaattctcgcaacatctcggatttgtactaagaacatagaacaggcagacatcatgttcagcgtgtcgtacaatcgagcgggacaaaggtcgagcatgtcgtcgcccggtgatcgtcatcggacacgcttatacgcccccgcgaggtcaccggtgaaacaatcgagactcgatcatgatcccgtcgactcaccccgagtcgagcgagctcggcatcgtccgagtctaggttggtatcaccgaggctaggactcctcgaggaagattggtcctcgacggccgaaggggaagcgtcgtgcatcctatcctgagtgacagtggctgatgtccttcgttgccggggctctgaagcgtagagatgaggggtcgacatcctgcaggggtttcagagcgagtttacgctcgaaatgggaacaagcggaggattccgttaaaaggaaatggttggccgtcgaacgtatcgattacaagacgatcgctatgatgctcaagtgcgtctcgtagactcgatgaatgaaaaggaatgtaagagtttgacgactgactgggcgagacgacgagggcaagggcagggcgaaggtcgaggttgtcacggatgcgaattcgacccggaaatgagcggtctgacccccccacgaacggctccattcgacttcgacttttttatgacggagactcgctcgcggatgcgaaacagaggctcggaacgcggggagcgcgcgatgatgaagcaggcacaatcgccagagccgtattccgcgaagcgagaagctgcccgaacagggcgtgaaagggagcgaagggtcaagggggatgggggaagggcagtaaaagggttcggtctcgttcgcctgcaggtgctaaagatccagggagattacatcgtttcgcgaattctgcacgttctcactcagcgaggttgggaaacgatcacgtatccatgcgagctaacgaacaagtgtttgggttggtatactgcgcatacgtgctaaacttgcaaaacgtttcggtccttgatttcttctagattcaagttgtttttaacatcgctgtgccgagacgggttttgaccgttctcacgttgaagggatgcagatcgatccaagttgcgaaaagggaccgagcggaacgataagggcgatcgacacgtctcgattggcccgtggcccggacgttctgtttttgcacaatgggcaccacatgcagaccccggggtaaaatgtggggtacaagtcgatgaccatccacgacaatattcacgggcttggagacgaataccatgtccgctttcgcggaatcacgaagtccaagtgatcaagctagaagcgcgactttgcgcttatcgaaaagctgctcacaacaaaccagactcggaggacgactacaaaaaacctccaatcgaaaagattcacctcacccatcacatgtcatgcgccgtttgttctttcttcattccgaaacgaaagaaactgtgagtactcatcttgaacatctttccgttcatctcccatcaaggagtttgtgtccctctggcgaacgcatctccggcggccccttccttcccttcgaccgcgtgtcttgatgacatcgtgtaatacatttcaaactagagtctggtagtcggggacatcgccaaagtgcggaactctcgactatgctccataaacgcacaactctgaacgcgatacacgtgctcctacctggaagattgagggcggacgatcatcaagcttcgcatcagatagctgacaatcatacgtcctttgttgcttagaacgacaaacaattgcccttgaaaatcacacgaccacacatagactactgtgagtgtcacgatcctggcttgcaatctgcctttcatcccctttctacccaaatcacatactccttactcgaatgatgtcccttaatggggaattaccgcctgaacaagccgatcacgaacctcgacctgcgagcacctctcggggagtgagcggggacggggggacgttcggaatacctgtcgacgaaacatggctgttttattttttctgactctatctcccttgagaattgtcgtcacttgcgtgatgactcttcgggccgtgtggatgaagcgtgattcttgtttagcgggacaaggtcgcttatgcttcatttcccatgcgatagatacgtttcatcctgaacaccaatttacgccgctagcctgtaattaacttgtgagtgttcatcgacttgatcgtctttcctctgtctcctcccccccttccacgaatctcgatatcgcccagcgcgaaggatgatccaatcacgacggtctactgaaataaataaaccccaagttgaaaaggcccgaacccatttatacgggcaccccatctgaacatctctttccccatatattgtcgcctccgtcgtattgcacaatattgcagcatgaaagctgacgtcgttccttccttgctcttttcttaaaagacgcccagtttccgcattcctccctgaccttcccggccatgtccgactcgacgcatcacgtctctgcctcgggtgctcgtttgttgttcgatccggctcttgtgccgagctcgatcggcggtcgactcccgccgcacatcgtcgtgcgtacagcgcttgtccattctataagctcgttcctagtcgagctcgttcggacaattgatctaacgatcatcgctgtcgtccgtcgttgttgcggtttattgtataggctagacccctcgctcgtgatgatcatgtcaacgaacacgttcagctgctctccactttgactgtcgccccggagctttcacccgaggtatacgaggcccagtttgatgccatgcttgagcggccggacacgtactacgtgctctgcttcgtccataccgagacgggcaagatcgtagcctcggctagtcttatcgtggaacgcaaattcttgaggaacgctggcatggtcggtcacgtcgaggacgtcgtcgtcgacccggaatgcaagggacaaagcttgggcaagatcatgatccagggattgagcgagctgggcatgcagaggggttgttacaaggtcatcctcgattgcgatgccaagaatgccggtgagcctttgcgggaaaatgtagcaacatgcgcagggctgacagtaccgcttgattggcaggcttttacgagaagtgcggataccgcaacgtcggggttgagatggctatctacaagcaatagagcgctggagagagagagtttgtgtgtgcgatcgaatgccggaataacggtccacgactactggatagatgcgagcagcgggatggacatttttttatgcagaccgtttgtactaaacctcgacaccttctcacgtatgtgatgtccttcaacttgtcaatgacacctactcgtcagcttgataaacgtgcctgacccgcttttgcttttctgtgatcacagcttgatcggtttacgccaaacgcgatcttcctgaacctggagagtacgcgcaggcgtgaatgatgtgacaacgtgaaagccatgccgcacctatccctcgtccactaagaacgacttgtcgaatacgtatgactgttggcatctcgagaatagctgattcatagatcaccgaactcgcgagcaaaagtgctgtttgatacgtggcgcctgatgtgtctgtgtatccggcctgacgggttgtccgatttcgcgtgacatcgcggacgggtaaagactaaagaaggcctttggaaaacaacatgttggagactgagtggatcggtgagtcggtggcctacaaactcggggtgctggaataacgcttgctaatgcacccaccacaacacaaatgatcatggagctacaaatcgtcaaaacaatcgagacagtgccgtcagagctttcagtgactgcccgaaaaagacgggagataccgcaggttcgtggggaaatataagctggcaaccatcggggctactgaaactcgaggacgaggcgcgttgctgaagacaaggaaactagtggatgcctcgatggtgagcctgacattggtgttccccgtcgacaagctgccaccactcccgtcttcaacaaaggtctatgcgaaacctgactggtttggataggcgctaggagtgttggggtttggtgcttgaaacgcttagaatgccaaggcggtcttccgggtttgctctttccgacagcggcttggaccccgtgcaagctcttctcactgcaacggcatgttcggcagtctggacggcttgcgcggtgagcggatcctgcaccacaagttgcataaatttccctgctgcaggtactcagccatcgcgcagcagatggacgcttttgcgacacaaccctacgatctggatgcttgaagcgcaaaggaagtgctggagaatcaaccggctttcgcgatcgagctaggaccccaccgggaggctacgagctagccggtagtttcgcgctaacgacggcagatccacctggtccccgcgatcatcaccgagactgatcccgtcgggttgacctttcctctcgggcctcagtcggaagcagaacctcatcgtctgatgacgctgctgctgttgcctcatgccccaagagcggggacccacttgttccgccacgaggctctctcggttggagggtaagcgactcgactagccatacacacactagcaaccaggtgaccatgcgagtttaccgatcgtcatcaacttcagttaccgtcaattagacatctcgacctagacaactagcacctagatagtcgcttataccacaggctctcgctcaagtgtatcccagactgggttgcatctgcattcaccagctttgacagcctcactatacctgtccttagtgccaccccgccgagtcacacatacacacacacgggcaaacacacacacacaccccctctcgacgattgccaggcagcagcaggaacaaaacagcatccgttcctcgtaatctctcttcttttcaggcttggcgtccatcgattcgaaccgtatccacagccaagactcgtccccgcctcgactggccagtggtgcggtgccggctactcgcacgcacatctcccagggcacgcagcatcatcgcatcgcatcgaccccgcccgccgcctccaccgcaactgcgcagacctcgctcgtgcttgatcatcgtccacctgcccaccttctggagcattgggcacttgttgtgctaatttggaccgacacacagtcacctacaattatcttcagtttccacagtccgcagcttgatcttggtttgatcgattgtttcgacaacttcgacttgaatcccatcgaactcagacgtggaaaggtataccttctagacaccgcaagaacaggtgcttagatcgcgagggctagtccttccgtaagtcgagttgagcattcgaaagactagtgtcagctttgctcacaggtattgcctcgtcagccataatcttcgacctacaaacctcgtgcaatctctcctcagatgactagcttgctaggcgttagtactgcttcctttggcctgcgtcgatcttccaactcggatcctccagcattcgtaccagcgtcacccgtctctccagcgaggtccacgttcaccggctccgggagtgccagcactggtgcatccctgcttttccccatcaaccctgcgttcaacgatggagcccctgtaggcggcatcttgttgaacaagcgtcgcccatcggacacgcccgactatgtagatccgaacccagcgcaagaggcctctccagtggaaggtctacccgcggggtacgccggcagtcccagcccggcagcgttcaaggtgaccaacctacctacgagtcccgcgttgagttcggatggcaagatggcgatgcaacaagaacctgggcattacaggtcttcaagcagcgagacggtctcgaccggtcctcccagcggggcagcggcagcggcgacgaacacggcgacgcgacccacacatgggagacaaccttcttccaccaagatcaggttcgcacccctacccactcccaacaggaaacgatcgctctcgacgggcaggaacatcgtcaccaaagccaagctcgagccggatgggacgcggacgttggagaggttcagcaagcaggatgggaatgacccatgggtgagcgatgacgatcgtttggcggggaggagcggggacggaggaatgtccaattcggcggtcgaggatgaagacgaggaggacgacgacgacgttggagccaagaaaccttcgtcatcgctgacatcgagcagttggatgaccatgggcatgggcaagaaacggacgagctcgatcacgtcgtcctcgtacacttataccaaaaagctcctgaaaccgttttctgggtcggacgataccaagacggccggatcttcatccacggctgatgctggcgattcgtcattgacgtttggtctgcccttgcgcaagacgatctcgactggaggcatgatgggcgcctcgccgttacgtacctcgggcgaacaagaacgacgacgttcgttcctgagcgcgggttcatccaaggacaaggagaacaagcgacacatgaggaacggttcgacctcggagactccggatttctcttccttgtcgagcagtctgggatacaaggcgcagaccgatttcgcgccctcggctgcggacatgcccaagagcgatcgacgaccggtgaggatgctcaacggacgtgtgtacggtgcgaaaaagggtcagtcgtcgaccttgaacaaggaacccgagttttccgaatggggcggtctgatgggcgccaaggggggcgggttgggttcaaacgctgctccgcgaccgagcgtgccgaccgagagacggagcgggtttttggacgacgaggacgatgggagcgggatgggttgggtcaagagacgtcgtgagcaaaaggaacgcgaacgacgggcgagcgagttggccaccgccgataaaccgggtcaaggttcgatcatcgacgatggcgatgacgggcccatcgtggggtcggtccccgcgctcagggtcaccccgccccattggcccgaatcgttctcccccgttagcggtggtggtggtggtgaatccgaacgatccctcggtcccgaattcagctcgaccaggccgacggaagcgacgatcatggaagaatcgagcatcccagggacgccgcatgaagagggtacgggcgcgatggccatcaagatgtcgagacccggcgcgccgacccctcactctggtgtgggtccggcggtggtgtcggcggcggattctgccgtcgaggacgagagcgggtccgaggtcagcgaggatgatgacgaggacgatgatgacgatgatgcaggggatttcgagagcgatgatgacgatgacgaggtcgagctcgagatggagggtttgggtgcgaattccaggtatgtcgtaccgatatgggtcttgtcgtccgacagcgaggggacggacggacgagctgatacgtcgtttgatacacccactcttccccagtgaaaacgcataaaatcgactctcttgatgacgaattcgtgacaaagcgacgaacgacatcatcgacgacgacgacgatttctattctcgaacacatcccatccttggtcgtcgtcgtcaacctctacttgactactcacctcacaaccacgactgaacaacctttaccatcacattctcccgcacatagcgctacatgtcattcctgcggaccctcacccgatcgacactcatcaccccacgccgtaccatcatgtcttcctcctcgtcgtcgtcgaccatccccgaacgtatgaagtgcgtactcgtcaaagatggcaaaggacccgcagagaatatgtatctgggggaagaagaggtgccgaaagtcaagagtggggaggtgttggtaaaggtcagtgcgagggtggggtggcggtagcgggaggcgaggatgagacggaggttggcttatgcagtcggcttttttttcttttctttcaattcttcttgcctttccctctttcttccttactcttaatcttttctcttcatcttcctcttcctcttcctcgtcctcttcttctcctcttcttcctctccttcctcgtccacctaccctcttcatcatctatccaccgtctatcgccatcttcatcccctctactttactcgtatcatggaatcctcgaccgctcggtatgcgaacactcgatcgccccgctactcgaccactctgcttgaacggcggatcccaacgctcctctccttgaacgggacggacctccttccgaacctcgtaccggccatgtcactgggatacacacggggaacctgcctggaaatcttttctcgctgtggtgataacgacgacgacgacgacgacgacgacgacgacgacgatgggatgcgcgctggacatcattacgacgaacctctattcgactggtaccttatcgtcgggtctctcgtcgatggcgacctcgttttcaaccgcacctcgtcgtcttcatcggtcaacccgggaaacgccctggacaaccatttttaatgcttcccgacgaccaaaccttcccttatcgattccgacactgtccatatcggcctcggaccggttccgacgtcgttatggaacgtatcggtcgatgatctgcgctccgggtcgtttccgccatcgtctcgtcgcctcgtcgaacttgcttgacgccgacaccgatccaaaccatcgctcgtgcttcctcgcgggacgccacggtcgatctgtatcggacttgtcctgtctgtcccgatgtcgcgtcctgaaacgctcctcggcggtcatcgactcgaaatgacgacgcatctcatgaccaatacggtctggacgagcctggactcgaccctcacggcgatctgaccgactgccaacgactcgcggccacttgaacccccgcagatcaaagctttcggcctcaacaggatggacatcatgcaacgtcaaggcaagtaccccttgcccccccaggctagcaaaacgatcatgggcgtcgaattcgccggcgaggtcgtcaagatgcacgaggacggcggggacaagagcgagaatggcgaaaaatggaaattgggcgatcaggtcgtcgggcttgcctacggagtacgtcgaccccgcaagaccctcggaagaactcaccgatactgaccgtcacctccctcgcaaatcagggcgcctacgccgagtacatcgccctgtcgtccaaaatgatcatccacaaaccccctcacttgaccccggtccaggccgcgggcgtaccagaaaactggatgaccgcgtaccaagccttgttcctcgaaggtggaatgaaagagggcgaaaacgtgttgatccatgcgggagccagcggggtcggtggagcggccatccaattggctcgtgagtcacaaagaaggcgacggcgtcacccgaggctcgtaatttgctgaccggggggcgaatcatcggcgccagtcaaattcggagccagcaaggtgttcaccacggcaggcaccgacgaaaaggtcgaatacttgaaaaagctaaccggaggcaaggtccatgcgttcaactacaagacgaccgatttcgagcaagaggtgaaaaaggtcgatgaggccggggtcgacttgattgtcgatttcatcggtcccgattactggaatcaggtgggtccgactcgcttcgttcggtgcaagcaccccgtggctgaccaattatcatcttccggcgcgatagaacatctcgttgttgcgacaagacggtcgtatgatcttgctcgccgccatgtccggtcccaaactgccggccgactcggcactcatccctatcctcttcaagcgactcaatatcaagggctcgacgctcaggtcaaggtcgcccgcttaccaaggagacctgctcggcaggttcgaaaaggaggccttggggtcgcttggcgccgaagacggggacaaggagatcaaggtcccgattcacaaggtcagcgctggttcgagccagcgatgcgcgataaagctgaaaattttcttgtgtcccccaggtcttttcatggcgagacattgtcgatgcgcacaaggagatggaggcgaacaagaacagcggcaaggtgagaggcttcgagttttccgtgacgttgacgcccatttgatggccgtatcttttgtacagatcgttctcgaaatcgattgagtgtctggtactgaggatcgtcaagcgcgtgaacatgtactcgcacaatcatggaatgataaatcgcatgcatacagagtctggcagccgctccgtgccctcgatcttgacggatgcgatacagccaagtccgccgtggcatcttcgtgtcgaacatctcgactcccatacgtcaatcacgtaggcgatgccctgcagaatggtaggcggcttacaggcagcgatcaaagtgtgagtcaccgactgccgctcgacttgctttgtccgactcattgttccccctcactgtgcggaaattgcccctcaacagagtctccgccaatccagggagggttccaatctagccccagactttgtcgtgctttggccctgaaccccatctggaagccgtccctcataccgaacaagcgtgtcactcttgatcaatttacccctatctcgaagtcatctcgttgccatctcagggagagttccgggcgcgcgatcctcttggataaatgtcgctagggcatgccgccctcgaatggcgattctgtccttccagcgatgtttcaggctgcttataaggccgcttaaagacccctgcccaaagaaagaagattgtcggctcaaccacccagagaacatcagcccgcctgcagcctcattcttagccccagcgtctagtcttcgatgcacgcaacgagacattcctcccagtggagcagatctttgggatggtcccggctagctcggtttccctgcagacgagaatataagcctgatcatctcggcctgaccatgtgatccatctcgagcattagcttgcattcatcgtcatcggccttgtgtagaagcaaacgggggaacgggccgtcggaacccggacaagcccttgtcgttcctgctcaagctctatcgggcttactggaacgacatgcgatgatcgatcgtgttgcccgtgctaatcgatcattccgtgacctggtcgcacgcgtaagtcaatgggcagctgatgctgctcggaggtgtattacaggacggtccagcaggccatcgccagcaatctcgtttggttagccaaaggacctgcttaggactctttttttcgacaataaagatctcgacaccgggctgcctgtactctttggatttgtaccttagcgcagaggccaaccgtcgaccaaatcaccacaagccgcttgccaaattcgtgctcgttgacattcaattttggacccttgcctgagcgcccctccaatcctcacatcaacatgtcattgcgggaatctttgaacatcgaaacgcgatccgggcgggacccttgatcgcccatgcgttcagtcacatgcccgctgtagctgtggaggtacagtatagacgctcaattttcccaaccgccctcgcctccaattgcttatgttacttgaaaagtctttgtgcatgcggtgctgaactgattgtgcgggtagtgccggaacaggtcgtaatgggtgataatggcccgcaataggcgagcaagggagtatcgcgtgtcagtcgaaaagaggtaataagagtgggattggactgggatcgagagggcgatcgaggcggtgcctgtttcttgtaacagagatgggcgttatgattgccaaagtaatctccagcacacctggtattgacgagtaggttgaagtgctgggcgtatcgtccgatggcgcgaatgacagtcctcgggaaaaggtatattcgagtctagacgtcagtagggttcacatcgtacgttcgctactgcccttgcgaccgtgtcttcatgtcatacaaactagtctatcgacctaaagtcgaccttgtttcgaagctgaaacgcggacattcttaataaaaaatgttgcaaagtccgtttttgaacaggagaaagtgacgaattctttggaatgaacagaaagcacccactatttgtcaagtatgtaatggtcgactcggttcatcgtgtcacatagcagaacagcggagatcagggtcaagaaacagggtcagcaaccagcatgaacgtactgcctggtactgttcggtgtttcttgcgatacggtggactccgggctcgtactcgtccagccatcgcggcaaacatcacggcgttcaactatgcttcactcgcacctcgaccctatgcagcaaacggtcgttggagcgatcgagaagcgatacggccggctcgaaactttgagcaaagaggctcaggaacagggcagttccggggacgagtagacgagcctcgagagataccgacgacgtggaaggtaaatcagatcgatagccagtgacatctcatctcatcttaccgctaggcggcctcccgctgacaaccgctaaacccaactcggcttcatccctccacagggctgcggtcttccatcacgtctggtagataggatcgaactcgtcttaccactcgccaaagatccgacgccagcacaagcagagttcttatccgccgtcttgttgggcaagagggacgtctttctgaaggaagatacggggagaggaaagtgagcgctttcttcccgcccatgcgagcggttccataccgcctgatcatgcagtatccactcgctgaccaccgtatatgacggcctgtgcgtgattcctctttcccgtgcgtaggactctggcactcgtcctcgccgccctggctcaccacctccgaccacgtcgaaacaagaacaaatcatcctcgaccggaccgacgttcctcctcctcgtcccgagcacgaccttgttgtcgcaggtcgagaggtggttcaacgagatctacccggacgagagcggacgagtatgggggacggtttaccctcgaggaacaggggatgaggatggggacgacgccctcgaagcaaagggacgagcgggaggagcgccggacatcttgatctccactccatcggccctgtgggatcgactcgaacatcccgacgacgcccattggttgagagaggacaccctaagacaagggttacaggtcgtagcgatggacgaaccggatgccatcatccgtccacttccgggcaggtatgaacagcaacgcaacgtgggtcggacgtcgggacaacggcaacacgtctttcatcgacatccacccgtcggggtcaaactgctggagaccatcttgcccggtcgacaagaagcagcaagaggccgcaaggtgcagacgatctggacatccgcgacggtcaattcgttgttgagaggatacatcgtcaaacggggatgggcgagaccgagaggagaaggaggggtcgtcctcgagcactctggtggggaacacggcgagacgaagggggtgcaacatgtatgctgggtggtggacccggaatcagggaaacataccgacctgtccgaaccggtcccgctgatgcaggaggacaaggagcagaagacggatctggtcggaccggggcagggggaagtacatcctcacttgatcgaggcactcgcgcttcactgggcgtcgaggggtaattcggccaagtcgctggtcgtacccccgaacggggcgagtgtgaggaagttacaagagacgttgagcgatctaggttgtccgagcgtctcgctggatgtcgattcaagggagacggcaagggacgtcggcgaggcattgcggcaggaccaagtcggagattcggacgccctggtcgatccgggcgaggacggcacgacgacacaggacaccctgtatatcctgcctcggagtcacctccgtgggatcgacttgcccaacgtcaagacggtctacctgctcggtggactcggcgtcaaggatctcaagggaggagggactggtgccggggtctgggccgagcgcgagagagagtacctgcactgggccgggcggatgggaaggatgagcggaacggctgtcgagggaaaggacaggggcgcagaccgcggcgagaacatcctcatgacgtttgtcttgaaggggccggaggaggtcttgatgcgcaggtttatggaaaagatgaaggagaggcagggcggccagatcggcgaggtggatgatgtcgcctagacggagcaggactgggtggatctcgatgggatttgccgtacgccccattgaggggtcttgcgtggcctcggatcagtcactttccggcccacgatagtagtacacacctctgtcggatctcaaagagcgacccaacggctttcccggtgcattgccgacttttatcatcggacaagagtcgggagcacaacaagtctaggttgtgactccagttgaaagtccgggatcccgaccaagatggctagccccaccacgtcttgcacctcccacctctaccagtcatgtcaatcaagaagaacagacgccgttcacagtcataatgaatgtggctagggtcgagcgatacctgaagttcgacggtaatcccggtgcacggtcaggtctcattagcaggggcgatcgtcaggctgaacctccgaataggttgtagcgcgattaacacttgtgtagatgtactatagtaattccgcaacagcatgaaaaataatcggcggtatcatggctagcctgttacggacgagtcagtctttcgtgcacatgtctcgaaatatggcacatgctcggccgccgtctgccgattcgagcttgctttcgtcgtgacaattctgcgttgctttggtcaatgaactacggtagtccctctcgtcgacgtcatgggcgtgtgacaccacggcgggattgtcgcaatagtgagggagacgagcgctgctcagccacgataaagttttaccgggtagccaccttttggttattcgatcgctcatgaaagactggcccggttgctagtcggctcatgtttctcctgatggccgatagcgatggcggggatattctactaggatcgctcggtttggaacgaggtgtcgctcacccgcaggcatacgagacatcagctcgagaaagacctttgacaagtcttcgacctgccacaattgcaaatttcgctcgacctggtcaatttccaacacaagctggtgttgtctccacaaggtcaggccctcaccaagttccagaatttcgaggtatatatggtcctgtccaaggggaagatgagtcggaaggtgccgatacattagtggtgtgacgaagcaactttctagccgtgaagatcgcttacattgacaacggcgtgctcaagtaagctctgcggtggtctgtacctgttgcaaacaaatcactgtgacaacattacgatatcaggtttgttgcagccaactacagcaagtgcttcatttgtactagtagtgctgcagctttgttgacctatgcagagcttcacttcatggaactgaagacaggctggtgcaaggggtccttcagagcctctatttgagatagctctgcctgccctggacgtcccggcgctgaggatcgcgtttcaacgccgtatcctcatcctcgtgacacgaagcgcgggtatgtctcttgacacatgaaaacttgctcgcacgcgcacgctacatcacctcgtccaccgtttcgcggcctacgcctcggatagacgtagcatcccacaaatcacatcccgactcgatcaagagaggacgcaattgtcgaccaatgtctatgaagacgaccgtcgaggcgaggcggggtgatcaaactgacaaccacccgtacgccgacccctcccgactttcgatcctgcctagcccgagtcatgtcatcgtctgatgatggacccgtcaatcgaacacctggtccgggacaccgagtcagcttggtcgatctccatgggttcgctggcccgtccatttcatctcggccgggtcggatcccaagctgaaacacgcatcaaagcgctcaacgcagaaagggtcccccttagcttccccaagtcctggatctctcgatcatgctcgggcttattccttatctaatcaataactcatcgacttgcaacttgattcgctagacctcggagcccagagtaacaagggtgtctgccaagcccgacctctacgatgaagtcacagtgtaaacgggatgatcccgcgcttgtcgaggtgtgatcgagatatcagctctagcggtgggacgaatcggaatcgccaggacgacgacccgggtcgagcgaggaacgaaggggtgaagttatgggggggcaaccgtgatcattggggagtaacccccgtgtcactctccggcaccccgcgacgaatgatcaagacgcgatagtcgccagtcgcccactcttccactgtcattttcgatcgcattgaacatacagaaggtggatctacggtcggaagtaattgcgagatggaaagatcagactggacgataagcgagagaccgtactttgaggagggaaagggagggacgaggtgtgatgacggcatggaacaggtcggcgctaagaaagataacgtcgatagatctgattggtcgctgggccaaaagggaggagcgggccggggttggccatttcgcgggatttaccaaaattcctgatttgtctcgggagtatttttcctgttcgctctttgcctcgaagcgaatgagattgatcggatcggtttcgttatctctgagtttcgtgagttcgggtttaggtcaggtcaacccagagacggagcgagcgaggtgggtcgattcgcggagagagcggggccatcgttgttcgtcgagcttttgacatctggggcagagatgcagacacatactacttgatactttgcatgtcattcacgcaaccacatccccgacattcagctattgtgcattcctcgtaaacgacctggttgaccttttataaacgatcgactagcttttcatagttggtcgtcaccgcctagactttgttcataaagaggcgaacacaccggatcctcacctacgcggtttccatcctcttttttccccctccctcttcaccacccgtctcttttctccacattcgactcgcatcgattttcaatcgattcgccaccagccaccccggctctaacaaaagacaaagacgacgaaaaaccgtacccaaacatggtcaacatcacgtacggactcatcacctcgggtttgacgacgggggatgcgacgatcaaccccagtggaacggtgagtcctggcgggcgggcctgcgtgtcggtgcttttgggttcttgtttcttggtcctctcgttggacgagcagggcgagttgggggaaacgggtcgaggacgacggtttcaaatttgaatgctctttcaatgagagatcccggtctcccctgaggcggtgcgggaaagtcgtgtgatctagctcgtgtgccacatatttcacaagaatatcgatcgatcgaacctagcacgcacgagtcgacatcaaacacgagtagaaactgacgattcgtggtgccgctttcgtttgatccaggatatgatcgtggaacaggatgatatgacgctcgcacgtgagtttcatcaacccggccactcgaccccgcgctcgcgctcccgctcgaaaaaaaggacgatcctttactgatcgaccggatgggtttagcgttcgatgcgggggatatcagttggatcttgacgtgtacggcgttggtttggttgatgatgtgagtcccagcgatcgatcgattggacgactcgctcgatcacccccggctgatcatgtacacgaccatccgcgcctctcctagtcccggactcggttacctctactcgggtctcgttcgacggaaaaacgccttgagcttgttgttcctctgtatggtcgcactcgccatcacctcgttccaatggttagtccaggcgtgtcgcgccccgacccggactcgcactgacaccccgtcgtcgctctcgtctcaggtggttctggggttacagtctcgtctactcggagaccggtggagtgtttttgggtaacctggacaacttttgtttcatgggcgtcctcggtcgcgccgtccccgagaccaacaacaagctccccgagatcgtgagtcgcatcgtggcgcacctcatcggcctgaatctaaacctctcccacccgcaggtctttgcgacgtaccagatgatgtttgcctgtctcgtcccggccatcgtcctcggtgcggcgtgtgaacgatcgcgcgtcttgcccgccatgatctgggtgttttgctggaccaccctcgtctacgatcccttggcccactggatctggagcgcgaacggttgggctttcaagtggggggtttacgattgtgagtcgtcgtccggcgccgtagtgcgacgatccctcggacgctgacgacatcgactcttcggcagacgccggtgggattcccgtcgagatcgcttccgggatcggtggactcgcctactcgtactttatcggcaaacgacggggttacgggaccgaacgcatcttgtacaaaccccacaacgtcggtcacgtcatcctcggcacagtcttgctctgggtcggatggctcggtttcaacgccgggagcacgtttgccgccaacttgaaggccgccatggctgcgttcaacaccaacctcgccggatccgtcggtgggatcgtctggatgattctcgatttcaggttggagaggaaatggagcgtcgtcgggttctgtaccggagccatcgccgggtacgtccaggttcggcgaaggggttgcaagcgtccacgatgctgaatctcaccttttcgccacagactcgtcgccatcaccccagctgctggattcgtcgggaccccggccgccgctctcatcggtctcgtcgccggagcttgttccaacttggccacccgactcaaggtctcgatgagggtcgacgatccgtgagttgagcgttggcgtcgacagtccgttgagaatccgctgatccgcgtctcctttgatctcgacagtatggatgtctttgccgtgcacgccttggcgggtgccattggaacttttatgaccggactgtgagccaggtccgccgatgtacgcctggaacttcccatctgactcgcctctttgctttgcgcccccacagctttgctcaagcctcggtcgctgccaacgacggttacgccgtcgtcgagggaggatggctcgaccgcaactttgctcaactcggtaaacaggtcgcctggatcgccgtcggtaccgcttggacctttgtcgtcacctacgccatcatgttcctcatcaacctcgtccccggtcttcatttccgggccgacgacgaggcccaagtcgtcggtatggacgaagtcgagcacgacgagtttgtcgccgattacgcttggttccatcgtgatatcgaggacagctggcacgctcgggctcacgaggctcaacgatcgagttcggagaaatcgaccacgacgggcgccgtcaccggggttcacgccgtgccagaggagaggggtagggacgtcaacccgatggagatgcagggtagaggacgaggcgagggaggtgttcacgaggatgacatggagatggccgagttggacaggaccgtcgaggatcacgtcaagcgatgaccaggggaggcaagcgactttgggcgggcggatggcaaggcgtagtagacggcaggaaacaaaaaaggcgggggaaacatcggcgaacggacggcaaggacgcatctggaactctcgctccctacacccctcgcgcatgtcctttctcaacaggatgtgggtgaaccttgagcgatcgaggattggacgtcgacggacggtcgcaggtgacttcaaggcgttgcaggactacctccgcccaacaacaacaacaacgttttgacatatatatatctatacacacccagtgtatgcagctttcctgtgcaatgactcgattggggaatagccttgtttcttttttgtatgcgatatagacgaccagaccagaccagagcagagtgaatcaccaccatgactttgttttggggtgttttatgaattttgaaacgcgtcatcatcatcgtccatttccgatcgatcgagccaaaacgacgaaaccaaactcggacgagatcgagcagagtcgttgtacagagtgatatatcgtcgtggtcgttatcgttctcatcttactctgacaccactacgtcgtgatctctctcatcatactcgtttccgcacacacatcatgggcatcatcacttctaccttgcgaaacgtcaacgcctgggctcatctgcccagcacgctcagggcaggttacgttctcggatggggagccctctttggtgccaacgtgagtcccgaacgggtcgtgccgtgccgataaaaggtctcctcgagcatacttctagatagctgatccgtgttctgccgatcgactggcattcaaatagatatggaattcgttcatcggcgggatcatcgccttcaaaactcgcaagtcgtgaccagacttaccgtccagctctttgtcatcaggctgacgtcgctactccccacccaacaccctgacgacagtcccccgacaagtatttggtaacctccaatcccgtcaattccccatctttttcgcctactcgacgctcggcgccctaggactcttgaccctcgatatcaagctccgccctcccctcatctccagcttcaaacacgcaccttggcagaccctccgagcgatgaacacgggaaccttttggggatccacggcggggttggctctcatcaccggggtgacccacgctgtcaacgggttgtacatcaccccggccgcatcggagtgcatgttcgagagacacaggttggagaggatcgagggaaagacttcagagacttcggtcagtctcgtctcgtctccgtgccattcaaatcggcaactcgtcgtgtcatgaccaagctgacccgaccgatcgaccttttgtccacgcggtttcctgagtaacagcgatcgaaagagatgcaagcacttaataaaaagtttacaaagctccacggcgcctcgtccaccctgaacacggtcggattgatcaccacgggtctcatcggatggaagatcggttcggtcgggctcggaccaaggggtgcgggtggactgggagtgaccatgtgatacaagtctaataagtagacatgggggacgacgacgagtgacgtttgattgtacgtctgctccggatgacggtgtaggatcgactgtattcaataatattgacaggcacgagcgtgacaagaccatgtccctcatcccgcttccgattccctcccctataaccttgcgcgaacacgatcgaatcgagcgttgtcaaatgtggaaggatcgatactcggttcgttccctaggaccatttccgacatcattttacccgtccctggccccaaattgatgccctgagggtgggagaaattacccggatcagtacgacaacggcttacagacccgcgatgatttggaaaggccgaacagaaaacctcaaataggtcagcgtcacccgtagctgttcatccgtaccgggtgacctgactctgcaaccaagtgagaagtaacatctcttccgccctcaagaaaagcgttgaatcattcaaagactatattatggtctgccaagagactggagcggtccccaacatctgatgcatcatttacagacttgtggacaacgaggacgcgattgtatcatggcaaaatactgctgatgacgaggtctctgttatttaggtagatcatctggacagccggtcgttaaagtaatcccgcatgaagccggaggacttcttggggtatcgtttgcaatcgtccttgtagtctatccaggtaacaccgaatcgagccgtatatccttcttgccctgaacgtagtttcgtggtcaggagagaaacgccgcgcgacgtctgcaatgatgatcgcttacattcaaagttgtcggtaaaagcccacatgatgtatgattttaccgggactccctgctcaatttttagagcgatctggtcggcgtaagtgccgaggtagtcgatgcggaaattgtcctgtagcgcaacgtcccgttcgagctcattttcattgggacagacgacaccgttttcagagctgtgggcaggaagcgattagatgcgggctacaaagaacgaaagaattcctcaggactcacatgtaaatgtccaagccgtatctgatcacgcagagcagggcgagccggataagcgaggcgacaaggctgccgaatctgaaccgaccgcaccgcttacttttcatatgcccagctcataagcttgccgaatccccacgctacgggtcgaacccaggacagtcccgctgcaggtccgatgtcttgcccatccttgtccttgaaacccatgtcgattcccggaaggaacgtcgggaacacgctttgctctccctttgaaggatcagtggcgcggatcatgttggtagtgtagtggttgatgctgtcgacgcgcggctcgattcagcaaggttatgagtaaagactcgcaagccaatgctaatcttacgccaagaaatcgctgctgcctttgaccaatgccttttggtcgtcggtgaagacgggcagacgggaaccgtgggtctccttgcaaagtgcagggtaatctcccgtaacgagaggttcggcgaacctgttgcgattaatacagttagcgccttattatccgatcagaccagatcgagacccgaggactcgccatccgttgtatacagccaagaacctttcggtagcgctgatatctgcaaagcgacgagatttcggttgaatacgggctgtacgagacacgaattcatgactactgacctgcaggcgaatccgttagagcctctgcgttcataccgacgatacaacgtcagcccacggatatgaacgtgtcgatccgctgctactcacctccccaaagcatattgacgaccaacccgatctttccgccctgggtcgatcggaaatctttgtcgtaagccctgacagccgatgcatgcgccagcaagaggttgtggccgacaataaacggttcaacttccgaatcgccttccggacaacgacttcgatcggaagatcggccgggggcgtgtcgacccgcagcgtgacccaaaagtgagtagatgttgggttctagacaagggcatggaaggatcggggaaatcacgtaagaccttgcgtgtttacctcctagaggtagcatacagggcttaccattgatcgtgaaccagaacttgacgagatcgcccaactcgcgataacaaaccttggcgtagtttacaaaatcggcgacgatatcgtgcgagaggaagccttgatacttgtcctgtaggacttgggggagatcccagtgaaacagggtctgtagcgagccaatcgtaagctaatcgtatcaagaggcggcttttatcgacttacgacaaatggagtctagatattggatcatttcatgtcgttcagccaggtagttctagcaacgagaacgccagatccgttcaaggactcacaatgccagcctcaagcaaacccttcaatactttgcgataccactgaattccggccttgttcactttggacccagccacaccatccggcaggatccgagtccagctaagagatagcctgtacgaattgacgccgtacgatcgcatgagcgcgatatcttgctcccagttcttgtacgtctcggtcgccgtcgaggtgtttcctccatcttcgctatgtgtggggtctgcagagaaagtatcccagatgctcgggctctttccatccgcagatatctgcacagacgtcggtttgttgtgaagttagttcctgactgtcgatcggaacgagccccactgaatgacttaccgagccttctacttgcgctgaagctgtagcataaccccaataaaagtccgaggggaacttggcggtagtcgacatgtttgtatagttcccgtgtacttgtgattgtgtaaaagggttccggacgcaatggacgatacgatacgatacaagtcaacatcaagcagattgtcgcctagcgactagctagagcactatcgtctgttcttatccctgtctagccagttcgaccgcacccgggttctccgacaacgacagtcgacatcatcgagtagaatcttccactactaccccgagattgattaatcgtccgccaacggtccgtaagaatccccgaatgaagttggcaaacgatgatcagtcacgaccggtctagcaaaaggttgaaacaaatgaccggtccttgtcgtttcggccgcgtcgggccggtgattatcatcagatttgggaaatatcaccggcggccccacccccaagatcacaccgaccaacgaaaaggtagagcatgaccggggatgatgaccgaccagctacaggagcgccgcaggggtatgtgcgatgcccctgaccgagatgcggtgttcatcgctgtcgaacctatctcttcctgactccggtcgatcacagagtgccccgctgacggggtcacccggggtagcgagcctcctactgaacccacctcgagaaatcaggatataagagcggcatcgagactatggtttgtcaacgatttgtgacacaactgacccgactttatctcgaatccaacaaccatcatcatccgccaagatgtcgaaaccaagcatgaagtttggaagcaagaacgcgatccgggacgagctcactcgcaacctgatctttgtggcctttttcgcctgcatgggatcggtaagtgccaggctcatctgcctgcccacaggcgattagacgatccccgagctgatctcattgacgaacccgtagttcactttcgggtacgacaatgcctggtggggaggtgtgctcggccatccttactttgtcgaaatctttggctcggatacgatcgtcgctggtgtgcctactcgagccctgacttcgacccagatttcggtggggacggccatgggatcggcttgtatcggtatcgggtgcatggccgcagggtacgtcgcggatgccatcggacgcaagcgatcgttctacgtcacggccatcggatcaggactcggtaccgtcattgaagtgacctcgggcatcggcggagggcgattctggcagttggtcgccgggaagctggtcatctgcttggccatcggagtcgcctcagtctcggtaccgctgtatctcgctgaatgcgcaccaggaccgatccgtggcgctatggtgaactcgtaggtctgggtacaatgtgagtccgagtcggcctgtcctcctttcggctgtccaattgatccggtacatcaatagcgatcggaggcttcgtggcatacggtgtcatctatggcatcctggaaaagcaatctcaagtggtatggatcttgccaatctgcctgcagatgttggctccggtcgtcacctgcgtcatggcaccccgcctccccgagtcgccccgatggctcgtggaaaaaggtcgcacggaagaggccaggtcggccctcttgtttctccgaggtggcaaagacggttacgatgtcgatgccgacttgcgcggactggaggagaacttccaggtggcccagagtaagagacaattgggctggctcgagtgcttcaagggacgtaatttggccagaaccaacgtctgtgtcggtgtccagaggtcagtgggcagtcgtcgacagacccttgcattcgatattgatgaaaatgctcggcgctcgcagtctccagcaaggccagggtcttgcctttatcgccaattacatggtcatctttttcattcagcttgggattcaaaacccctacatgatcttgctcatcagtaagcgtcattacggtaggacttcatgcgatccatacttatacgtattgctgcacgaacagtctatggagccatcatgatcccgttcaccgcctcggggttctttacccaggattactttggtcgtaggactctcctgatgaccggaggcgccatcatgggtgcgagcatgtttgccctggcgggagtcgtcgcttcgacggcagatggcaccgtcaccggcgccaaggccaacgtctgcgtctttttcagtgcgtaggctgaagggatctatggtcgccgtcatagatcgctgactcacgtccctcgcagtcgtactctggctcgtagcgttcacgcaatcgtggaccggtatcccttggacggtctcggcagaagttcccgccgatgatttgcgtgacaagacgttggcattgggtgccgcttcgggctactggatcggcaagtgcaacctctactttttttcgagactcggccatgctgacgtgttcagttgacaaccctgtaggcatgatcgtctcgctcgcttcaccgtacttgcagcaagatcccgtcaatatgggcggcaagatcgggttcatctggggcggcgtctctgcgatcacgctggcctgggtcttttggtttgttcccgaactcaaggtcagtcgagcgagcgacccggggtcagtcagagcgaccggctgatctgagacgtcaaccgtcgctttcgcagggacgcactctcgaacagatcgactacatgtatgatcgtggaatccccgcacgcaaaatgtcgacctatgtcatggaaacacagccggagcaggatggcgagatcgatcaggcataccagcacgcagacgacaagatgggagagaagggcgatttcgcgcatcacgattgaggcgaggcgcgacaatcagctccttgttgctatcgagatcgatggcagagcggatggtcacacaaaagtgattggcgagaggatcaaggctgtcgatcggttttcttacgcagtctctgtcgacgtgctttccgttgtagaaatattgtccattatgaatttggatacaaagcaatgggattattggctgtctagcatcctatcggaagataaagcgttgaatacgatcaatcctttttagggtacaacctcgattggatttctcagctccaaggtgacgacgtaatctcccttggactagcatcgaccgacaactggaatctcattcgatcgggtagcttctatgtcagcccatccgacttttgagaggatcctcgtctaggcggttcctgatatcgagcaatccgcatcaatagatatcgagagtcgtatgaataccatatcgatctgatggcccgatgcggttttcctttgcgaagcgaatgccgatcacggcaaccgtttcgggcagtctttgcatctatctgagcacgacaaggggcagaatctttgtcgttctatctgcgctcgaccgagcgatatgttttgcatacggtcagatgtatcgatcagtctggtctccggtctttttaaacggcacaccgcatggccctcacaaaacacatcaaacacaacgcaaaaagtcacgagacaaggcggaagtagaaaggatccagcagaatagtcagagaggccaagaggaagtgactgcagcaaggctgtcgtgtcatctgaaaaacaacagcgggcactacaaatacgcactctagcctctactgaaaggcgccccataagtaattagccatgtccagatgtacagtctcgctctcaatccgacacgtgatcatcctcgcgacgctgctgactgctgactgctccggcctgatgctgagatcgataggagacgccaagtgaaatgagctgcaagctgactttataccgacatggcctttccaaactcaccacgagctcgctgagtagatgctgatcaagccgaatgctccacgagctattgctacgtgtcttccttctgcgtccatttgcaggtgacataacccctaagtgactactagactgagaaacagaacgcagtttccgtcatctcgagtgcgtctatgaaccggtacctgcactggtccgcagccgtgatgcgaggctgaaccattcttgtttcagacccgaaacggtccgactttgttcatatcacgtgatttctttcatttcgagatgcggcgcctcggtgcggcgatcacgacggcgaccttggacctatagtcagctacatcgttgttgtcctaaacaccggtcacccccgacggtccccgctcgatatttgaatacaccggtagtaccggtctactcgtctggctaaatcaccgtcccgtgttaatggtccgcagattaatgccgatgtgccgtccgtgagttcgaagattaccactatcgatgcggacattgacccgctcgagcccccaggccgactagtatcgggtcgtataaggcaagtacggctctggtcaagatgagggtccagcacgacattcaactcgccatcgccattcgacctcaagcctcaagcatcctgtcaatatgcacgctcccaagacttatcgtaaccccatccttcccggtgtcaacccggatccgagcatcacctatgtcgaaggaatggggtactacctgtgtacctcgactttcgaatacttccctggtcttccaatctaccacagccgggacatggtcaactggaccttgatcggccatgccctcaacagacgatcccaagggatcgacatgcgcaccgtcgaggcgtcgggcggcttgtgggccccgacgttgagatacaacaagggcaagtggtacgtcgcttgtacgtgcttttacaagatcgtgaccgaggtcagtctgtcatgcaggatgtggctccatcccgatgactgacagaccggtcgttggtctatctgcagggcgacaaaccgatgatggtcgagccgaacgggttttacgtgagcaccgacgatattcacgacgactccaagtggagcgacgccgtctactttgagcagctgggattcgatcaagacgtgagtcggaccgccaagagatgaaagccgtcccgggtctgatttgtcgactctgcacacctcgcccttgcagatcctattcgacgacgacgatcggacgtatctcacctgcacccgattccatttcacgtacgaacccgaattctcgatgaagatcgtctcatactcgaacgaattcgacctcgccaccggccgatcgttgacgaaacctcgtctgaccatggactcggtgctgggtaccgccgaggggtgccatgtcatcaagcgcgagggttggtactacctgtttacggccgaggggggcactcaggatgggcatcaggaatgggtctatcggagtcggcagccgatgggaccgtggcaagctccgcccgacgccgtcaatccgatcgttttcaacggcaatcatcccgatatccagaataccgggcatttggacatggtcgagggcgagaacggacaatggtgggcagtgttcctcggagtgagaccacagttttcacagaaacaactggtcaacccgatcctcatgcggtcggcgctgggcagagaatcgttcatggctcccgtcgaatgggtcgatggatggcccgtcgtcaacaagcagcgacctatcgagttgatcggccaggctgatgtcgaaaacgtttcgtacgtcccggcttcgagctggattgacgagtttgggacgagcagtgagtcggaaggtagaaagcgatcgacttggtccgggcgactgacgacccgcaagtgcgcacagctctccaactcggctggtacaccgtccgcacgcccttgcgccaattccactcgttgacggaacgacctggtcacctagccatccgaggttccgcatacgccatcgactatcaggaatcgccttccgcgctcctgcgaaaacagcccgatttcgacggcgagtggtcgaccgagatggagtttgagcctagcgaaaagggccaggccgccggactcgtcgtgtggctggacaaggatgcacatgtcacattgagcgtccggggaaccgatagcgaaggcgggaaagagttgatcttcaagtcgcctacctcgggccgaactttcgaggtgcgttcaacagtcggccccggtgactcgagaagagtaattaatcgaactttctctgtgttaggaaacgacctttgccctagcatccggcccccaacctcttattctcggggtcaaggcgagaaagtcggcgtacgaattatggttcaaacgcgccggcgaaccagcggtgacggtgggatccgtcccgacgcatcttttccagcccttgttcacgggcgttcatatcggcgtctacgctcagggtgtctctggctctccctgtctcgggtcggcttactttcgatatgccaggtgggatgccgtcggcgatgatcagcgataagacggggccgttggtagcgcgtgatgtatcgacatttgatgtcagagcggaactttggcttgcgactcgttgtatgattaaatggtccatcgaatgccgtcctgtcatctgcaattagatccgtacaagcttgaattccaagatattgtcagccccagtatcactagctgctaggcatgagcgagccaagcgaaagcgcaagccagtttggcaaggtctgggtacgaagtccagcacctgcctgcatcaagagccggtatgtgcagaatgtcgacatcgtacatcccgtcatctcggggctcgttaattcagctagaggccaccttgcaacaaggacttggtagctctgaccgcagtcttcgacatttgccattaatcagcttgcccggtgaacgaattcacgatcggaaacaggcatggacgtccgcagcgaaacagtggaagacgttctcaatcggtcgtcagcacagcgagatcaagggcacaagacgactctgcgccaagcgtcagtcgtattcgttgcccgaatttttcactcggctttgaaaagctgatcgtagccgctggcgccggcggttcgggtctgtcgaatagttgcatcggctgtcgaacgatcaaggcgagtcgaggcgcctcctctccaggcaacaacgtgaagctgacagccaatcgagacaggtcaaatgcttggctggaccgggagctagatgtaccagatgtgatcgactggatctagtgtgcgagtacaagtccaagaagcggggtcgtcgagcgaagacgaggtgagtcgatattatcaggttccccttcaaatcgccagtcgacggcatcctcagctgaacaatacctttgacacgttcgtcttgacgtgttcgtcgatagaaacacttcggaaggatcaccccaggatccgtcggtgagccccctggaccccacacaaacctcgaacgaccaactcggcgccctgaattcgacatcccccgggccggcgttcctacaagactcgagttacgatccagcaccatggcctaatacgatagacagcaataccctgcaggttcgccggggctgctctcataattagccgaagtctcctgctgattgtgtgatcactcgactctcagacgctgggatcgatgccgcaagccgaatttgatctgctgaacgctcaactcgggttgtctttcgacccgctgctatcgtacgactttgctacgtccagctatcctctaagtctcaacgccaacgttacgaccgagtacaatctcgatccaggctttagtaatgggtccctgtcccatcgacaacctgtccccggaccatcgaggcggcaacaacaggttacgcctgatctacggacgtcaccttccggtcgtttatggaataatgacaggcatgatgatgctgcacatcaacaaatccgcgtcgacctcgacgaagatgctgggagcgacgatcaggccgacgtgactggctacgatccgttcgatgatccgatttatctacgtctggtcacgttggagcaagccgagaagatgtacaactcgtgagttatcgagaacgacgatgacaatgacgagctgacgagatacatgttggggcctgtaggttcatgcgacaactcaatcccatcatggccatgtttgaacccgcttgtgagcaggtcgcctgatcgtatcatcagatccgtagagccgattctcgcacccgcccctcagatcacacattcgaccaggttcggtcggtgtcgcccttcttgttgacgacgatcgtctgcctgggggccaggttctgtacggagggtcgttcgacgtaccagacgctctacccgcacgccaaaaccctcctgaacaaggccatcatcggcggtcattgcgatatcaccacaatacaagggatatcctgctttattttctggggcctgccacgagaaagcaagcaaacgtggcaaaggctagggcatgcaatacgattggcctaccagctcgggatgcatgtgccacggaattcagacttgcctgtagacgacgacgaggcaaaggcggtattggtgagaaccgtcggtcgaggtcgtcgaacaaggctggggctgatcgatcggaatgttcgctcgacgtagaatcgggaacgaacatggtactgtaagtaaaagcagggtcgatcagttgggttaggggttagacgctgatgatcattgcaggtctacacagtgagcctgcactcggcgtcaaatataagccgaatcgatgctgatcatcgttctcatcgcttcgcttcgtcacagcgtatgatcatatgtgagtcatagcgccgtcccgaatcgcgccatcgactctcatctgccatcatcgcctcgcttacaggtacagccgtatcgagcgtctcccgtctttcatgaagggtcacgagttcctggatccgcggctctgggtaacggaccgaccagagttacacaaagagttggattggcacctgtgcatgtgcatttcgtgagtcgcgtggtatcgaacgtcaccagggaggaggtctcgactgatgccacatcgtctcggcctgatcctcagatacatgtcggccacgatacaaatcatgagactcggtgaagcggctaggacggcgcctatcactgaaagtcaaatcgatcgattagagagcgagctgaccgggattttcaatcgatacaaggagggtcggcaaggtgggtcgatagtcacaagcccgatattggcacgtcgatcctgaagacgttcccggatgacttgcaggagaaatccaagactctcgggcgaccccgatgtggtactacgaccacatgctgcggctgtctcgcttgcgcctacactgccatccttcgcaagatggcctgcttgattgccatcggtgggcggttctctacctggacaccatgacgggatgggcaaaatggggtaccgttcattcgatgcatgatattcagcatcgcgtgtatgccagtacagcgagatatctcgtatcggtgagtgcgttgtcggcaaagagacgagcgactcgagctgacgacgttccctgcgcccgtcaaagctgcattcgtctgcgtcccttccagcgaccgctcggtcggagtcgctgcacgtgatcgagcaggcctgccagctgtttgaaaagaacgtctcgctggatgctggtggggcgatcgccgttcagtcggaccggtttcggaagatgctgcggcgaatcacccgagtcgagatggcgactgatgatcgaggtcggggatgatgccggcgggatgacgccgggtctcggaatcgctcatctatgactatcatgcaatgctttttgtctatgctacagcggggttcgatcgcctagttgccaaattcttcaagggcgattcgaatcgcgtctcctcggtccccgagtgccttgccttgggcttgataaccctcgaccacctcggccgcctcgtcgttctccttccagccgcccttgtaatacttgaccatggctcgggggccttgagcgaatgtggcttcgaagcgagcattgttggcgggtgtgccgtggccaccgagcgagagcacgaccgaaggaggaatcgctgccgggtcgagggtgaggtcagcaacgagcagagcatcaggacgacatcctggacccactgagtcgtccgattttgaagcagaatgtcgagaccgatacggcgtgcacgatggccccgtcaggtcggttcgaagatagcctcttgatggccggagacaggtcgcctgaaacgctggcctggctcgatgaggcggtctgggcgagcgtctttttgcctttaggagggtgcgtcacgaagagtccgacggcatacatctggcgagcgaccggggctgtcagtcggtgtaactccctggctagaacccaaacctcgactcacccatttgtcaccccagcctccaaacgagatctcgacgtcgtacttcgcgagaggcggcagttcgtgcaagaatcgatgggtggtgcctgtcgaagcgatgtcggcgtggtttgagcatcgtattgaagctcgcgagtcggtctgcagcccgagctcacctgctatcggcaagatacctcccgatgcaagaaatggaccgaacagttcgatcgccgtctaggtcaggcggaggggtgtatgatgtcagcatgacggcaagctgaacagcaattcgtcggactcacgttcgatcgagcaatgtccatgtcggcagcgtatgtactgttggacttgtgcaagttgtaatcgacatcgctaggccagactcggaagccagggatcaccaagcgttgctttgccggatcctgtccgaggctggctttgacgagagccttgggatcttttcgacgcagccagagcttgacgacgggtgtgaggactgtggatcgcaaggtcagttgcatgtcatgaaatgacgagcctcgagagtggaagcttaccttttacatgccacacgaacggtaaggagctggggcacaggcagacggtacgatcagtctctgtacgactgacctcgaatcggagcgactcctcacttggcattataaagggcaaccaacgcaacgatcagcttgatgagccagatcattgtgatatctagagatgtggggtacggcgggtctgacgagatctacttcgaggtcatggaggaggtgcactagagatgcaatttacagtcagtctcgtcgtttcaactttttttaacgaggccaccgtcggcaaccgcccaatcccgggtaaccgcgtcaaagatcgtccgccggtaaaggtcgatccgacgatccggacgtcgcctcgaggaacatattcgtcttggtacgaccaagcatccacgagcatagagggacccgatccgtcacggcaccaagcttgttcaacttcagtaagcacaatgacatatggtcactggaagcgatgtctgagcattcgcaaccatatgcatgtcaaatcagggtgtttgatgtggtgtgcgcgagatcaagttgctacaaacggcgcgtcgtaaatcgagccatgctttgtgaacctttgcaagcattcgcaagcatatctggttcagcttagggtcaaacacggcccagagatcaccaagcttgaagtggagaatgtcaccgtggacgcaacgggaacggacagatggaaacatcatcaagggattacaaacatcaacctacgccagtattagcacaaggcaagacaggacactgtttttgtgctgttttcttggcactgcttctgggcataccgaagctactctgacctgactcttgcattatcatgacacaatcgtcccttctaccaacctcatcgtgaaacacggcgttatccgccaatactgctgctggccgacaacattcgatttgctgggaattgacccgaatcatcatcaacactgcagtcttgccaaatgtttacgagccaagcggctttaggcctcattgtaaggccgaccttgcgatgacgacgagaattctagtcggtccctacttcctctgactgaataatatcgacacgcaagacgccaacggaagtccacccgtcgggcccgatctgtgagctctgttggctcgccagaggccacttataccacattccgatcggaaccgaaggctctgggagtccctccacgatcttggtgccctcgacggtgacgatacgcccggactcaggcggcgtgaggcgacagatcgcgtctctacgccaaccgaaggcctcggcgatcttcttgacctttgcatccaagccgtcgggatgatacaaggctacccggcgagcatcacggagcttgccgtaagagtatagttcgacctgaacgaggtgggccgcgagaccatccctcatggacgataaagttctaccgaccggcttgtcagcgatgaacagctgggtgccctcgagtaaagagcccaaaccgtcgcgcttgccgagatgccaggacccttcgtagtgaaaggccattcctccatcggcagcacagtaatccatccgcccgtctccatgaggcagaccatcgcgcatgtggccctgatagtacgagccgtcggtcgtgctgcgaagtatgcccggccagtctttctctccggatagcttccagatcaattggccgcttggccctgctagccgtccatagaccaggttcaaggtctccggagaaacggccgcactcttgaggcccttgtttatgggaccgacggggtcgggatcgagctgaaggatttcagacgccagcaaggggtctgcatagatcgtatggaccgttgtgctgcttccagtaccggtggcctgctgtacaaaggtgatgaaatcgacggcagagagggagagggtgttgagcaacgaaacccgacggtaatttggcgggatgaggaagagactgaggctgcgcttagaatcggccgctacctcgcgcatacgctctttgataccgttgggcccgatcaaggtcttgcccaatttggtcagttcgttggaaaggatttggaacgacgtccaggcccggtcgatggcggcatttgcttgctgcgatgcggccgaggcaggcaggcggctctgcataaatgcgttagcggactggctgctagtgtcggagcggtaactccgaaggaagctacccagggcagtttgggtgtctgtgaggagcctttccgtcatgcccacagcgctccgagcctgctggaccagcgaggggcatagcaaacggagccggctagactccatctgaccaaacgtcgttccagccgagtggtgcaggtcgagcacttggtcatagaagttggtgagtgcagccagctcggcggcggctaactccctgaaggcgatgacggtagaaaagccatcaaagtgctgtacaggggtcaaggtgatctcgatcggaacgcccgcaagcgtgacgccgggtctaccggccaagacgtgagagccgtcagggcggacttcaaagtcggtggagaggcccttgatgccgcgctggagacgagcgactagggcagggccggtggtgggcgtttccgactcgtcgtcgaccgtatcggcatcaaaggagatggcgacttcgttgccagtactgccctcatcgttgagcgacgacccgactgcggtcccggaaaatttgaatcccgaggcaaggacgatcttgagtgcgccatccccgctgagctccttccatttcttcttctcgcgctgggagaggtagaacgtgccaaggagacgggagccgtaggtgatgccggtgacaacgtgagaaacgccgaaacgggacaggtcagctgcggtgtagacctgctggtggttgaggctctggtggtggagacgctcgtgtagggtgcggacgttcatgagaccggagatggcttcggatcgctccttaaagtcctctccgcggagatacttggcctgaaaggaaacatcgccgatggtattgccaagggccgagagctgaactttgccctgaacgttgaggaggtccgcgcgatctttagacgtgcgaacctcgcgataagtgagttcggtctgggggacgggcaggatgcgagtagccttgtcgatatcccttttcagaaagagatagtcatttcgaaacgagtcggttagacccgaatagagctggccgagttcgcacgatcggccgagtgcctgtacgatttcgtctgccatcctctgtacgcgctatcaggcccttcgctaccttgtcgagttcgactgacggtatgcaaggggcaatccaccgtggcatgacaagagtgcactttcctgatggtgctcatcttcagccagcgaggggtgtctttatgcgaccttgatggcctagttgaccgtcgggctgacagacgaggcgagggtacggtccatgtatcaggtgggacgcaagacaacgtcgggtgatcacgcttatccgttatcgcggaagccagacgtcacgagacttccaacatgtcaagtgacctgacctagacttgcgcgtgaccgcaggcttcgggccgtctgatcatgttgaagttgggcgcgtagccatacttgacggcctttagtagctacagttgcaattcgcacccctgtccctagtgtcagtctgctacggtcagtctgtccatgtctgagacttccgactcgaccaccggatcgaccatcatgagcggcgatactaaagagctccttgtaccaatccttggcaggccggtcttcctgggccagctttacgatgctacgagcggtaactttgtcaactgggacttgttcgatggtgaagccgtttcggtgactggcaaccgcgtcggtggcaaccacgtccaattgttgaggggcgatcagaccaaagacaaggccgaccatctcaatctttcggccactgtggctgccgacctactcagcggcacgcttcaagtcaagggcggcgccagctacctgacggactatggatctaaatcagaatccatcgccatccagtttagcaccgctgtcggccgtgctagcacttacatcgttgtaaacgagctgctcaactccgggaagctgtccactacactccttcgtgccatcggggccacgcacttaggggttaggggttaggggttcgggtgggaaggtatcgagcaagccggttggggggtcgaagagtatggggatgggtgggtcgttgaggatccgcaggacgacgaagctagacgtacagccagggaggaggagatgatcatcctcacgagcgtgctcgacgatcgcgtcacccaggtctcggagcaagaggtcgccatcgaggtctcggccgtgccgggagaggatctcgtgctcaacgtcatcttttccgaagcatcaccttacccctcggcgcggtatcccacccatccgccatcgttctacctcacctcccagtcgttgccctcgtactttcgcttacaccttcacggcgaggtcttgagggcattcagggacccagagaggcccgatctccagtcgctcctcgaagccggagccgggggtgcggtctacgccatgatggagattctcgagacggcgctcccggcgtgcctcgaacgaccgcccgatatcgcctcggtcacgcggtacctcgtgcccaaggtcgaggacgtcgcgcaagaggtcgaggtgaggaaacgattacaaaagctcaaggtcggtcgagggcgaggtcgacagtcgggcatgtctcagcaagagatccgtgcgcaccacgaggccatgcaggcggctccaggttggaaatcgatgttggaggccaggcagaggttgcccgcctggtcctcgcgtcaagatatcatcgacgcactcgaacagaatcgggtcgtcgtcattgtcggagagaccgggtcggggaaatctacccagtcgccaagttacatcctcgatcacgagatcgctcaaggtcgaggagcctcgaccaacatctttgtcactcaaccccggcgtgtcgctgcgatcggagtggcgactcgggtggctgaagagcgcatggaagatctcgacaagggcgctcagacggtcggctatgtcattcgaggcgagtcgaggacgaacgccaagatggccaagatcacattctgcacgaccggagtggtcctcaggcggttggccagtggaggagacgccgatctcgagggagtctcgcacattatcgtcgacgaggtgcatgagcgtagcgtcgacggtgactttttgttgcttcagctgcgtgaggtcttgaaacgcaacaagaccatcaaggtgagcgtggacggtacggttcgcgggtccgggatggatcgctcacgagtttccaattccgactcaggtcattctgatgagtgctactatcaaccaagaacaattcatcaattactttggcggcgcgcccgccatcgagattcccggtttcacgcatcccgtgcaagacttgtgagggtcctcggttaatccgccctcacgttgccctacactcataacgatcctcgttgcagctacatggaagactatctgccgatgatccagtatcgcgccgagacgccaagattcaaggtcaaacagaccgacgatcaacgggcctccctcaagacctggttggatggtttggacatggacgtcggagcgaaacaatccctagaggccctatctattaacacgcaaataccttacgacttgatcgcggcgttggtcgcccatatcgagacgacctcgcagaaagcagacgatgggatcttgatcttgtgagtcaaagcgatttgatttctaggcgattacaggagctcacgcacgcatctttagcctgcctggtgtcggagagatcaaatcctgcgtcgaagctcttcgccaacgggtccgcaacgtcgacattttcccccttcacgccaatctatccaacgcggagcaaaagcaggtgtttgccaagacgaaacggagaaaggtcgtcgtcgcaaccaacgttgccgagaccagtgtcaccattgcggatatcgtctacgtgattgatagcggaaaggtcaaggagactcagttcgacgccgatacgaacatgtcccgcttggtcgaaacgtatacaaggtgagctggtaggctggccagtgtacagcgcgtattctgtccgctcataatgatttcaccagccgagctgcttctcgccagagacgaggacgagctggacgaacgaaaccaggaatctgttacaagattttcagtcgacgaaccgaaaaccaattcatggcccgtttcgccgttccagaaattttgagaacgcccctggaaagcttgttcttacaggtcaagagcatggacccagacgccgacgtcaagcagtaccttctgtaggtcgcaattggtggtctcgaggtctgcgtcatgttgacaacgtttcactacgcctcgcagaaaagccatcgatccgcccaaaatcgaggcaatggatgcggcttggaagacactgctcgacctcggggctgtagagggagaagccatgacatcacgattaactgctttgggtagacacgtaagttcagcatgtcgcggtctaggtcatgccatactgaccgagccgccggctcgcacagatgtctgcgcttccggtagacttgcgtttggccaagatgctggtgctcgcatgcattttccgtgcactggatcccgtcctcaccatcgcggccatgctctccagcaagcccctcttcagcggccccatggagaagagggaagagatgaaaaagtgaggcgcagtcggctcgttccgcttcaactccagctgattagtttgttgcacagagcacgagagaagttctcgtggggacagtctgacatcctcctcaatctgagggcatacaacggagccgttgcatgcggcggttactcggccatgcggtcgttctgtgacgagaatttcgtcaacttcaacacggttcgagatatcacctcgttacgccaagatttccaagcggccctgggggagatcggtctcatagacccacctggcagaggcccgcgaagggatcaagcccttgacgagtggaacatcaattccgacaatgaaagtctgctcaaagccatcctcgtcggagcattctggccaaggatcgttcgtatccgattgccggatgccaaattcgaaaaggtccaggccggaagtgtagccaaggagcacgaagctagagaggtcaagtactacgacagtgtcgacaacagtcgtgtcttcatagtaggctaagagcagcgctttgatacggtccacgagatgctcaactctacaacctcactcgcagcaccccggttccattctcttccacgaaaacaacctcaagccgggttatatcacctttttccatcgagcggaaacgtccaaagtattcctctttgatgcaacacccgtaagctggctgtgagcacgaaacgcatgttcagtggtctgacacgagctgtcatcatgccaggtaccactcttcgcgctactcttgtttggaggccaattaacgatcaatcactttgcgggcggaatcacgatcggcaaggaagggaacattcgacttcgagcctggtcccgaataggtatcctcgccaaccagctacgacgcctactcgacgcaagattggccgaggtcattgagtcttcaggagacgatgtgattggaaagaacgacgacattgtcacggcgatgctggcattgttaccataatcatctagatgagcaaacagcatgtagcatagcatataatagcatcaaatcctgaccacattcggtcaagacaaggtttttgccacggcccacttcagcgaaggcaggatcgcttcatcccaccatttgactccctccggccacgtatttgagtgatgttcggctggaaaaccaaggcgtcaattcagcccgaggagattgtgtagcttccggtcagacttaccaactccgtggggctgtatcgataccgtcaacgcggtatatcagaaactttaggcgctttcagacgctaaccaccttcgagtcttctcaccatgccttgggctacaaagacggggctttccaccccaagttgctcgagatccttggcaaaggcatacgagtcctcggtccctagcagcgcatcatctgtggcgacgacgacgcaagtcggaggtgtctcggcgttgatggtgttgatacaagatgctgaagctgggtagggagggtcttgtccgatgagaaaggagttgatgcatccgctaatgacgacctgttcatctcgcaggaagtgttcggggttatcatctggtccttcggtagaggctcttcaccaagactgaccgacatcagccatttcatccggggagtcttactgtccggtgtccattccctggcggttcggaaataaatcaattacttccactcccgtgattcaagcagggctagaaatggcaagacatactcgtgaggatggcctgtagagatgggcccatcgtagatcgcgttcaaggtagtacgctcttcctccgagagccctttggcaaactcttccaaagtcgaacgaggcttgttgtgctgcttatgaggctgggtcatggggtacgtgatgatgttggcccgggggagcgaaacaggcgacgaggtcgtcttgttatactcttggatgtcgtgagactggcgaggaagcggaatgagtcggtgatacggcggagggccagtctgtcgtcaagcttacaaggaacacggtagcagtacctccagcactccagccctgaacgttcatcctgttgctgtctggcttcgccttggatccggctgcctgaagctttcctcccatctgggaatgtacaaagaggtatccatcgagcaagtcttgacggatatcgtcgaggtggacactgcagaggaaattgcatgatctgagacgccgcaatacctgtccaactacatctctcttactgaggttgtagtcgatactcgagcgagacgacgatgaatccgttttcgaggtagtaattcacgttgttgaacgggatatcgtccgcggcctccatagtgaagccgctgccaacgttccagtcaatactgggtcatcctgaccttgaacaggatcggaagctcaccctccatgtatcatgacggctacaggacatgtctcgccctgatgttcatcattgcttttgggtagccaaacgagggcgtgacaccctccgcttgacgatcccgggacatctttgaagcgaaagacgtgcgaaggggtgatcttgtctcctttgtccatgttactgtgttcgtcgaaagcgaagtattgtatagaggtctactctagctattatgactattgtatacagacgataatgtcgagcagcgaggtgtagcgggatcgagtttgtggatgtcccacctggttgtcgatagttgttcgatgtgatgatgatccgatttcggggagatttcgggtttgaccgaatttaacatcatcatcgccgcgactttgaacgccgcaagaagtatgacgagcctcttctggtgagcgtagaatgtcgatccgcagagcttttgaccggtgtacatacccatgacgactggaatcttgccctgacattgccgtgatgttcccgtacatcatgttccaaatgaggataaccgtccaacagcgggtcccctcgctggcattgtgcccgaaacgtgcgaacccttcgcgctctatcgatccgcgctttcacacatgggtttgtccagtaccgcgtggaataacagagggccaagacccaggaatgacttagaaggatgtttgccagaccacaggattccgatttcccaccgagatctcaaggcgcctacaaaccttatcacgcgaccaacgatcggtaagtcctcaaacagagcgatccgtcttttgacaaggcagattcggcttttagaaggtatcgaaatcatcatgaaatttagtgtgcatgtcgggtctataatcatacgtacgctatggcgttcgagcttgttgccatagagccaatcttgcggtgcgttcggagaggcaaacagatccgcatccaagctacccaccaaagccgcatgccaatcgcagatttccgaccgctattcgatttccgcaagagttgaaccgagagcaagtcgatgttaacaagtccgttacgcgaaccgaagcccagctttcgaaatgatgtaccacgggcaagtcgcaaggaaattgccgagctgaacattcatcgcgaagttctcggttggggcacaaagcgctggatagctcacttctgccgtcgtttgggacaaatctcgtcgagagtttccagtttccgtagacatgagtctcaaagaggttattactttactagacatggcgtcgcctgctgctaaaatcggctctgaacagcagggtcttcccgctcagagcaggccctttcctaggtatgagacacccccccctgcaatatccctgcaagagtacgcatctcacaactgcaatcttaccatgaacgaggcggatacgtgggctgtctcgctctctcttgatggtgcgatggtgatcggcgcttggcttgcgcgatgttcgagcgactgtcaaacaccgtaacgtggcaccagctacccgcgtcttgcggcgacgattgtcagagtcaaacagccaacgatcgtcacggacccgcgacaagcgatacctaagggtagatactaccgccatcctatcgactgacaccgaataccctataagcgcagaggacgatactttcaccctgtaggccctgtacgccatctgaagaggtcgtcgtcacctcgaaacaaagtggggatgatcagcggtttgatcccgctagccttcgtcaaaaggtccgacgagggcgaatctgataccggcgaagaccgctcgtgatcccgcacagacgcggaggaagatgaaacgggcggcacgcatgggaagccgctcgtccggaagattgaagggtcttcttttagatcggggtattcgtcctcttttctacccatagaaggatacaaacagagatcgtcgacggtcggaatgcgtccggtgtttcaagggtttgcaggtcgcctttcgggaacaactagagctaccctctttcacgacattctccctgcgcgaggctcttcggcgcaaggaaggtcccgggcaggtgttcgtttgcagcactacaacaaaccacgaagcagataggggaggtgggacgaaggcgagaggtccacgtgaaccaacgtcaacagtgcgctctgtttactgttcagatcacgtcgtcatcgatcagccgaccgtccatctcgctgctcacgaagatgaaatcgggatccgggcaaagcgagtcatgaagggatccactccacaatcgagcctgctggcgcgacctcaatgtgtcatatcgaaatgaaagggcaagatggccttttgtcgttgctggttcggccgatgtgtcattccgctgcgtgcaccgctccatcgacattccgagggcaagaacatggtgagtcccctgaattcgacctgatacaggaacggaacctgcccagagatacgaatctcggtattctggcgcctggaccgccaatgttttccgctcggcacggtggcttgtaatggctttgttttggtcggaggcgtaattccttccatgatcagcgctccgtgctccctccccccactcacaactgccgattccggagacccaatggcgcagaaagaaggcggggggacgtagcctccacacttgcagccacgcggcatgtggcgttcggcgtgcgaggaacacaaacaaaacaatgatatcgacgctaacccatcaaactcttgccaccgcttcgtttgatgccctctctcgccgattcccccgtagatcatcacccatcaccatcaccgtagtcgtcgtagccccctccccttgtccccctcccctgtttctttggacgatcactcgattcacgactcgttcctctcgctcgagccgacaggaatgttgtggtgatcgtacagtcccctagtttgccactgatcaacgtcgatcgttgtcatccggctccacccaaaagtcagccgtccgaaggatcgccagaataaagatatatagctgggctatccatcattccattccatcacattccctcgccgattcattccttttctgtcacgacaactccaacccattctactgctagccagtactaccaagaccacgcctcacatatacgagacacattcgacatgtttctcaactacctcagcgcctcttccctcttgctcctcttggccaacttggcaacgccggccgttgcccaccccaacgatggatggcacttcgaccaagctttcacgctagtcaccgaacaactcgacccaatcgtcaaccccaatgctcaaggtacacacatgcacagggtcatcggaggtagcaacttccgagcggctcacagtttcagtgccgctcaatcatcgagctgtagctcgatcgctgtccagggagacaagtccaactactggatgccccaggtgagtgctcatggatggccgtcgtccgcaatccattcctcgtgctgaccctcttcgccatcgtagctctactggatcaacgacggtggcaagagcttcaccccgatgaaagctgccattcgattctactactttttggcacccaacaacgaaaaggatcccgtggtgcagtttcctgatggcttgaggatcctctccggaaaccccaacagcaagtctgcgaaccccaacaactacgccatggtctgtcaggctctgcccaacacgggcaggtcggatgtcactgcctatgacttcaactttgcgactgactgcccgagggtgagtgaacgccaaggtcgacccttgttgctatccgacattaaatatgtttcttgttcgcgtctcgcagggtttgaagaccaacctctacatgcccaactgttggaatggaaaggacctttggttgccaggcggagctcacatgtcgtttaatgccaacggacaatcgcgaggaggtgcttgtccttggagccatcccatcaagatccccagcatcatgttggagtgagtcttgacctagtctcccatcaggtcagccgaattgacagctgaccgcaccggctttcaccccaaaggtacacctggagggtagacgagtacaagcctggtgtgcccctcaagggtaaccttgcttgggccaacggtgacacgactggatacggtattcacggtgactttaccaacgggtacgtctggacccaatgagttatccctcctgaataagactgacctttgctactcggcaacagttgggaccgaaacttgctggccaaggccatgtctgaccagaactgtgttggcaagggtagcgtcatgtgagtcgaatggtgcgagtctcatcaaaccgtctcgaaacgcgcttacatgacgattgatctatccacagcccttcggacacttgccctacctttatcgccaacatggacacgaacaaggcttccaactgcaagcctgacgccggagtcttggccgagcgagctggaaacactgatggtatcaccatcgccaccatgcccggttgcaaccctctctgtatgtgtggcttgcgagtctcgttggacaggacatgagctgatgtaggcaatgggaccgtttttccagggggaaacacggcgaccaagcccgcttgctctggcgcgcctcagtacgacatttcccgtttcaaggcgaccgacggtagccttgtcgccgtctctggtcaacgtcgagaccgacccatcccctcgagcgccggctggatcccgctcggatgcctcaaggagtcttccagctttaccgacgccaaggcttatttgtggcccaaggatttgactcaggaaaagtgcatgaagcaatgtgctactgatggcaagaagtttgccgctgtcggaggacatgccgacaacgtgagtcttgcgttgaccaagatgtctacgaccatcgatctgatggctctgtcgtcccccttcagtgtatctgtgccaatggaatcaaagacagtgcccccgtcatgaccggattgtgtaccgctccttgccctggtaactctgctcagactgtgagtcttacaccggccgtgaaaatcgctcgagaagcggccaggctgacatcgtctgacctcattcagtgtggtactgcgtactcttacaacgtctatggtgccggtcccgggacgaccgcttcgagccctgccaagcctgccaacgtcgtccgatccattgaagactcgctcgatgtcgagaagcgttccggctggaaggtcatgctcggcagcggacagggcaagatgatcaggcgatcggattgagacgagcctccaatccccccaacttaacttaacgacaaacgacctcttccgaatcgaccacactgtaccccaccgactctccctctcctggatcgccggacgatcaacgacgtgatcacaaagtaattctcccctgttcgcgtctctctcctcatacacgctgtatcacctcatcatcgaatcttcggagatcgttcgttttcgcccatttgttaccttctctgcatgtaatacgatacgtcatcagagcgtatgaaatggaattcggtttacgaccatgaaaccgtgtaaccagccgtgatcgaccgtagtgtgtgagacggattgttgctatcttttttcggcatgtcttgtggccctgaaaacatgttgaactaacactgtgcagtatgtcgccgaggtcccccgagcttgcccgagtcgcgtttgttgttgtttgtttgttgttgtttggtgtttgttctttcgcgttggcgcgccggatacctggggttgttgttcgttgttgtttgcttgtttgcttgttgcttgttgatgatgtgtttgctgtgctagcgtgctcgaacacgcgcgagaaagccacgggaaaacagagaagagagaaacagagagaaaaacacaacgggcgtggtggacacccctgccgggctattctcgagcccgacattcgattcttgatcatctcatattcaattcagtccactcttcctgcactgccactctcccttgttcgacacagccaacgttgcgacacacacactctcttttcttctcatacatacatctacacgaccatcgcctcgcgcaagaccgacacgccgcaacaagaccccagacctctacacaccaaaatcatcatgatgttcatcaaattcttcaccatcgctcccctctttgctctcgccgtcaaggctgtcaccgtcacctctcccactgaggggcagaactgggggactacgggcgctcagaccgtctcctgggaagccgtctcgactgaccctaccagcttttccgtcgtgctcgtcaacgacgtgagtggaggaccgtccgtcttgggtctcccccacgcgataccagggaatgctgatttggagtacgcgatcgatcgatcgatcgatcgatcgatggtggcggtggtatagaaccgactcaacgctgcggatggccaggtcaccttgatcgccaatcaatcgacttcggctggatccatcagcgtgtcccctcccaggtgagcataaagggactcgtaattgcgttgcacgtcgaggacacttccattgacacgtgtaatgcgtcgcactgtccacttctatagcggaagctggactgctggacaggcttacaggatcaggctggtccgggacgatgccatcctcgtgagtgccccacctgcatcccacccccgtctcgtccatacctgcaagctgaccacgacgccacgtaactcttccaggcgtcgtctgatcaattcaacatcacctcttccggtaccgctggagcttcgatgaccgcctcgtcagggtcgagctcgacgatgatcatgagcagcgccacgcgatccgtccctaccgccatgacctcggccggtgccgctaccgagtccaccacgtccatctacagcggcaactaccagaccaccgggatccctccttcgtccagcgtgagtagtcatcgggtggcgagaggaagccgagcagtagatgtcgtccgggttggcttggctgacgagcggacgtacggtttgtttccctggttatcgtgtcgtacatagcaaaccgctggaaacggagccggttccaacagcgccaacatgctcgctctcggtggagctggcatcatcgccttgggttacctcgtcggtgcctaggaggtgctcgccccgagtcgatcaacggaacggtcgtgctggacggaccggactggacatttcgtttgagagtgtttttcgcccgtgtttcttttcgtgtctaccaactactcgacatgctattatcaaagctatttataccaacgatatggaggaaagaaaaggcatactttataaatttcgaatcacgagccgctggagtcgacgccgcttcgtgcgcgcggacaagtcatcgactgaaatgagagagcaaaaagagtcggaatgatcacgacgaggatcgaacgcgcgcgatctcgacctcatctctcgacctcgatggccccctcggatcagcaagacaaaaaaacttcctacaacctcgtatacaacgtccaggcagttctgaattacaaaaagtctacgtgtagaacttcccccctgtcctctcaaccatcccaccccgtcaaacccctctaggaggtttgtgagtggttctcttggtgagatgaggagttgcttagtaactgttcctaggggctcgttaccactaggtcagtgccatcgcggttatacctcatcacctgtttgtgcgtctatgatggagcatgcgcgcgtcattttgcttccgagtgatcggtcgtctttgcccttctcccccgagtcgtagccagagtgtaggtctggctgcgatcctgtgacttgtcttggttcgaacatcaaaggaggtcgacacggaacaagcgtttcgactcgtccagatagtggtagtcccaggtcatacccgggctcgtatcaacctcctcactcatcactgtatagaagtgggagctgctgtacccaaagatctcgatttgcaagacacgaaacagaacgaaacacgcacgaataaacaaacacgccgatatcccgcaaccaaacgaaacgatacagcacgaaaccaaatcaagacgaaggacgcaggggcgacaatcgactcttgaacagatcgtataacacttgttcaagaccatcacgctctcttgtccaaccacgctctattccgactcccgacgacttccaaccgctagctctccttacgacctgactgggcctggtgcctcatcagatctgccaagacttgctcgccatcaatagacgttttccaccatcacgtatccatcaacacgcctttacgaaccatcaacctctccgcatcgagagacaagcttggatctccgacgagcagctcattagacagctcggacgactcacacatcgaccttgcgatgggtcgtactcgatcttttcctcactcgggccggtcccaccccgcttcccctcgttcccaacttcgcagcccatgggaccgacgagcgtgcatctcttgtcccggcgagacgcctagctgtaattgcgggcccaacgagaattgcgtgttgaccagtcggtgagtgatccgatggaccgccggggttgccgctcgacactactgataccgacctgcttcgtgtccatgtggggggaaacaggacgtgcacgcaatgtccacagatccaatgcttacccgcagaggaatcctcgggcgggtcgggaggaggatctaaagtcaatccgggcgtgatcgcgggacccgtcgtcgccgtcgtcgtcctcggcgtgttgagcgccgggttgtggtggttgtggaagaggaaaaaggtaagcttcgtgtcggcctcggtgtctcggtatcgcaagacatgtagctcatcccagaacaaacctcggcatgtacaaccaggcccgtgatatggcagcattagagtcgttcgagaagcgtcaatcgactacgcgttcacagagaccgtctcatcggtccgcttcgcccttggcagatctcggaccccggacggggacgggtttgctcgtcaactcggccagtggggaattccctagcgacgtcaggcccagtatggataccatcggtgcaatcggcgcgaacgggacgcaaagacgggtgtacgagggggaggagagcatcaacttgactcggaacgggttgatgggacgggatggagaagacccgttcgatgatcggaggagcatcgccacggatcaactgtcctttggatctaccaacgtcatcccgatcgcctacgttccgcccggccacggacaatcgggggaaggagacaagatgacggcaggggaacgactggacgcggcgagacgagcgctcggtcccggtttcaaccccgtcggtcctcccagtcgaccggcgaggtcgcctgacctcgacttgcgtcttcggcccgccatgccaggccatcaaccgccgacgagtttcgctcatccggaattggtcgagacgctcggacctcagggcggagggaacagggacgtcgtttcatcgagagcaagcatgttgacaacgcgcacaggtgtcagcgtggccccgagcttcttgtccggttcctcggctttcgaatcggaagcgcctcagatcgtcacccgccgacaggtccagacgggggtcgtccagcaagccgccgtcgtcgacctttcggggcatttggcaccgatcggacggaatctgaccgcaggggatacaaagtacggttggaactcgagcgacggtggggatcgcagtccaggcgccctgtccgctcggtccgccatgagtggggcttcggatccgttcgacgacaagcgggcggatcgagcgagcgggaacacgtttggcaagatgctcgactcggccgacggacacgagcggggcgaagacgatacgaggggagatcacgggacgtacggattgggtctgggtgaccccacggacgatctcaggttctcgatggggagtctggcgatgggagcggggaacccgagtcgagattcagtcaatagcagcatgaccgggtggtctgttggtcaggtccaagtcggtcaagctcagcgtgtcaatttggccactacgcctcagaaatcgttcaatcggcccgtggacatgcaatccgcacattaccaacaaccacactatcagagagaaagcgtcatgtcgggtcgatccgaggccagttcattccttaacgctatcatcccgccctctggaccgatgtcgaccccgtacgaaaagatgccgtcgggcatgtccaatatgacgctcgggaacgaccaggctagcccgtccaagcgggatacgagcgcgactaggcaaacgatgatgtcgacccacagcgagggtctaggaggattcgatttccggttcgacggggatggcaatgggcatggagaaggagggatgatccccggaccacctcgaaggaggccagcatgagcaccggctcgaggccccgcaggagccgggtaaaatagcaacgttgcttggcagcgagatgatgcggtctcggaccggggtttttttttcgtatggaccgtatttgtacagaggctttgcttgtattgccaatataccgaaagagatgggcaccatgagggacccctttttctcctatgttttgtccagaggccagaggcgagacgaggaacgagtgtgtcgaaacgatcgtgtccgtcaaaccggtctagtcgtggatccctcgtttagcgcgcaaacggtcaaatccggtgggcacacgtttgtgaaggggacggtctaagccgatgacgatgcccgtgaagaggtcgtcgagctgcacttttctcggatgattatccacgatgcttccatacctctatcataatcgctttcgattgcctagcgtcgttcagtcaggttctagcttgccaaggaccctgcacgttcatgctcccgcgtttcggtcgagaaataatgtgtcgcacatgattcgtcgggagggatgggttccgtctcgccgctccagccaactgaagtatatagcacatcattagacaaatgtgaggactgttctgatgcaagagattcatatcagagacgttcctgcactcgtccgttgaaatctgaagcgtccagcctgcttcgatcatgacaactaaacatctcgttgcactggcttcggccttgcttcccttggctattgccggcaaccacctcgatgccaataacctcgtctaccgctcgccctataccaatcacgatgggctggcagtggacacacatgctgttgccaaaaggcacgaaaagactaccgagctcctgaggaaacgtcagatctcccagcccgctcctcagggtgatgtcgacacctataccttgagcggctatgggttgggtgcgacggactggagcaactcgaataggatctacgctggtgacctaaatttcagtgagtccgcgggctgcggcttgcagggaagttaccggctgactgaccgaccccgcgttcgcccaccagctcactcggttgccagtggagacccctacgattattcggtcctcctgtggacccgggccgaacctaccgccgaggccccgatcgacattcccgtttgtgtcacttacaaagtctatgatggtcagaacaagaccgtaagttgctctcgcgcgtcttcttgacatcacgtatctgagatctgaaaccgattcgcaggtcagcagtggacacgcgttcaccagcgcggatgtcgattacacggtcaaggttgaagctactggtttaaatgctttgacgaagtactcttatcaattcgccaactgtgcaaagccggatcaaatcagcgctaccggccgaacgaagacggccccagggaagcacgccaccaacgtgcccaccctgaactttgcggtctattcgtgctctaattggccgaacgggttcttcaatgcttatagcgggcctttgacaaacggggatagcgactttatcctgcatacaggggactatatgtgagtagatgagataacgtcgaatacgcaaggatgacctgctgataccgcttggtttcccaatgttcagatacgagtatgggaccggaggtgacgcgatcaacaggaccaacttcagacagacagagttggcttctcttgacgactatcgtttgcgttacaaccaatacagaaccgatgtaggcgatatcgtgaccattctgcaaggctgaatgtcgggctgagcaagccccttctcgcgtcacttacagcccgacttgtctgctagtcatcaaaatttgccatggatcgtaagttggtctagcatttgagtcttttggcttcaaagttttaactgtacaagatacctttcaggctgtttgggacgatcacgagactgccaacaacggtagcttcttcaaaagcccgtcggcatcttgtcctctatcgctcacacccctcgcttccgtctccagattggaaggccggctcgcagaactccaataactcgtaccccgctggatgctcctacggcaaccagaccgggatttgtttcgatgagaggtccgcaaacgccaagcgggcttaccacgaatggatgccgtgagtatgcggaatgaccacgcgctcaacccataggctcatgtcttgtgctctcagtatccgacaagtcgaccttggtgacgagggaaggatttggcgggactttgcatttggtgatctgctcgatctcatcgcgctcgatactagaaaatagtcagtcggatgcgtaaatgtgccccgcaagtgcttcgcagctcaaacgcgaaaatcacgacgacacagcgaccgagacattaccgacttgtccccgactattcccaacaaggactatatcgctagcttggcggtggaactcaactcttctcgctcgatcacgggacctgttcaagagcaatggatgtttgacacgatcaagaagagtcacgaaaaggggacaaaatggcgagtgcttatgaaccaggtcatctttggctccgtacgtatgacgccagaggagatttagagtagcagcgagtcgtatactcagtcttccctcttcagatcaaccatactgccacgtcgaccaaccctactgctccgggggtatttgacgtcaactacgacgcatgggatgggtaccagggacaacgtcaacgaatcctcaatcgggcctacgacgaggagtggaccaacgtggccatggtcgtcggcgatacacattcgttttggttgcatgaaatcgaacgaggaaacgtcctcgcagggtcgacagacgtgagggacacgctgcaacacgagctcgactcgtcggccggctataagcgaggtaggattgtcgaatttgggggtaccgcagtcagctcgaacgggtggggtagcgtctggagaaactctgccaacgctactgagagggctgccagtcagttggtacagaacagtggatcgttgctctactcggaagggttttgtgagtctgcgttagggttatattagagtttgtcatctgatcaagcgcggggcttctttacgatgatcctcagaccgaggatacatgaccgtcgaggtatcctacagtaacatcaccgtaagccataccgaggttcgtatccgcactagctgcactgacagagtcgagctgtccgcctcacagaccaggatgtgggcgtacgatggcaatcaggttggtcgaacgcagaacaggtcgcagatcgcttcctttgtcatgcccgacggtaccaatatgatccagaggtaggtctgctcaccgttcgctgcagaaacgaatgctaatcccgtcgtttttttaggcctatccaagtccaagccggtgccgtcaagcccgggcaataaacgcaacaccccgaccgatatcgaagctgccgaaaagagagaaggaaactggcgtatcggagaaatggcgttgtcgaaagaggaagaagaagacggactccgaatagtgaatatatagacatgaacgaaacgtaccaagagcagatggacgggaaagattcgaagccaattaggttcattgacgttctacgggagatccaacccagtttggatttctctgataagcgcggtttgaggagagggacgacccacaattgacggaatcgtcacgacgtaaagttgacagacgatgactgagcattcgtcatgatctcttcgacgtcctatttgtgcatgtggtgtgtagatgtgtgtgtgtgtgtgtgtctgcttgtgtcgctgttcatacttgaagcctatgggggagggaggaatcgacaaccctactactactctgtgaccaaaagtcacatgacgtgtcactacgctcgcgcgatttctgaattgttgactgtgcaacagctgcaactgcaactgcatgtaaccttgttaatctacacagccatatcaggtcatcgtcgtcgtgtcggtagagtctcaactcgcaactcagcggtaaagatagcgggcttggtagaaactcgcagtcacttccatcgacacagctattcgattcttgacattcatccaggccaagctggacatttcatcgcggcattgtcaaactggcgcgagagatcaggttgtgtacatcgacatcggcgtcaaaggggtcgtgcaaggaactatacacgcagaaggactttcggccgttgacgaggaccggctcgacctctattcgaaataaagagaaccaaccacggctcttctcgtcgaaacacgaatggctccagattacctagcttctaaccgataatcgcttcgcggaacgcccagcgaaccaagtatcaatctccacgctctatacccggcgagacctgttcagatgaagcgcttcttcaagcccaaaggggcagcggcggatcctacaccgttccctttggacccaccggcaggttcatacgagtcgttcgctccgacctcgaacccaccactaggtcgatcgaacgaacctcccgccagcgcaccgggcttggcaccgtctcttcctccgaaaccagctcgattcctcaacatcggcggggcagccaaagagagcgtcacgccatttcctctcgcccctgcctctgctcctctcgtagcttctgggcatggagatcgagctcgatcgcacggagatctggtctcgatggatatcgctcgggagcatgacactctcggaaagggaccaccaccgagcgaggccaagatcagtcgtagagtgagcatgaagggcaacgagggtcggggaatgttcgggttcgccaggaaagacaaggacaaggacaaggagagggaagcggaccgaaagaatcgacctcgacgtggctcggagcagcaagattattctcgcccgcttgggaactttgaaccgatcagttcacgtaattcgcagacgggtcagttcagctgtcatttgccaaatatgtctactctcgactgatatgaccataccgatccgctcttgtctcgaacctatcttagaattgcatccgggttcaatggagaacagtcaacagcttcatcctggattccgctcagctccacctatcggaatgaccgggcagtaccaagcggaatcttacccaaactttgttagcgaccagccgcctgtgtctcagcaatatggacacccatacatcccgccataccctccacaagcacatggacacgggcatccccgtgaaaggccgtctagagacttagagcacgagcgagacgacccgaatcatctaggcaggccgatcgctctctctcggttgacgagtgacgtgtccggaaggagcagcccgggcatggacgcctttagcggggatgatgccgagcacttgttgtccaagagccacggatcgggtacgttcgacgacagggtagtccatgggcgagaacgaggtgcgagcaacgccagtggtcggctggatgaacgtatagccatcggacgcgaacgcgaaggtagtaatgctagcggaagggcgtcgccgtatggaggtgctttcttacaacctcgacacgctggccctagggctccgatgggttctccgggtctccctactgatcaaggtactggagaaaaccgactgtccacgagcgggttaggacaagcccatcaatatgggtatcagcaacatgtctcgcgagagtccgactcgtcggttgggcatcatgcgggtctgcagagcttgaccgtaccatccgacgggcatggacaggcactcgctcccaggcggtcaggagattctgcccgaaacgttccgtggcaagagggagaccgtacaggcaggccgtcgatggacacgtctcacgaaggaaagggggggttgagggccatgttcagccgaacaccccaccgggatgaaccggaatctgaggtcgacgagggcaaacggaagaagggcttctttggcttggggggcaagggtaaagatcatcacgacgacaaggaaaagggcaagtttgggcgaaagctcaggaagagcgatgccgagcccgaaggtcatcggtaccacccggaggagggcgtgtcaataccaaacgggtcgatgcagggctccgtagattggacgcatgcaggtatggacaggggccgaatctcacctatgccgggctttaccgcatcatcaatgccgacgacgcgtgtggctagtccaatccctccacctcaactggcggcgagtgcagtctatgctcctcagctagtcgcgcacgaagttagcaaaaaggagcgagaaaaggcgatccgcgagtcacaagagagaacaaaggagtttcttaaagctgaaaagaaggaccgcgaaagggcggaaaaggaagccgctagagcggaaaaggaagagcagaagaagcgaggcgagtatggtagcgtcacttgggccatcagtaagtctgtcattttgtaaggttacgtgtgacatgcgctgaacctggcacttctgcgtagatgacctttgcgaccgagctcaagctcgagagtacgctttgattttggagctctcggatcgcatcgctcagtcgaatgaagaggtcgggaaggaggcagctcgcgcaattcgcaaggcgatcaagtatgggactagcgaaggtggcggactcgatgtagagcgagtgatggccatgaagatttggctcttgtgctgtacgaacgggtctgacagaagcgatcttcgaagtgagtctcctatcgcgccatgcgactcatccacgggaccgaagaggcttacaagctcgattggaattgcgccgtaggccaagcgacatctaagcgattccttcaggctatcgagccattgctgttgcctgaaaaggacaagcatatcctgcgtcaagacgggtacgaccggcttcgcgacacggtggctcatctcaactatacgtatgggcaccacaagggctcagaaggcttgcgcgaattgtggaacaagattaaaataaaggaggagccagaggaggtgagctcttaccgctgaaggcttaatgcttcccacatcacctaacaaagcctggtcgtgaacttgcaggggtacccgttcgcacctagcaatccggtttattccccgtcagacaagcttcttcggcattcaacgagctttgaggagaaagatcatagtatgcctcacggccccgaaccgctgactgtgcagagccagccttctttcctggccgagattcccaacgagcaggaagatcttaccaaattgatgcgcgaagcgctgacttgcaaagagcatgctcgcgttcttcaatccgctttggcacacgtcaagccaagcagacttgactccgatccgatcgtccaggtgggttcgagctattggtcgtctaaccatgtcgcaggcacatttaaccgcgttgttttcaacgtcttgtacaggaattttatgcaacgtgtgtgcgcgaccaagagtcgctagtgtctcagatgggttgggccaacgctcaggctgaaaaggcgcgggatgaccgaggtctgaactcggctaatcagcatgaggacggctatcaaggccagatgcaacgattgagcgtgtcagatgaaggtccatctttccccgagagagtgttcctggaggtcctcgctgcgagtgacgagttgtcccaggcaagtctttgtctcggcaaacgaaacgaaacaagctaactgcttgctcccgtgatcacgcaggctctgaaactgcacgaggaaatcgagagggactttcgcgccgatcgagagctacgatacgtgcaggaaaagagcaagactgagactcgtatgaaccgcaacgtaagtattttctgatgaaagttttacactcgaagcgagaccgacctctgcccttccgtcaaatgcagtccatgggcaattggcctgatacttcgctcggcgtaccccagatgggcggcacagcgagctcgtctcggtcacgctcgccttcaccctctggacagcgcagagactcagcatcagctatcaattacacagcttccgtatcgcacgaggatcatgccgatcgacctcgtcggccttatgccgatgcatcaggtgctggccgaagtcctaccccagaatcttcaatcgatctctctgcgccgcgtttcccgggagagggccggtccaactcacctacaagaatcgcagggaaggttcaaggtccacgtccgatcgtagagtcgatgagaaagaaccaatatccgagcgacaacagcctccggtcttcgcaagctcatggactggctgcgaacaacggtacgggccgatcacctcttactctcgccaacgatttcgatcaccggtctgatgacgatgatgatcggcccccggcgaggccgagtgccaaggcgatgggaaaacgccgagccgttgtgcagaccgaacgtaagtaacacaacgctcaagtttcagaattctcgctgaaatatagctggtgcttcagccgaattcgaccctgacgacattttcaagaccgacgacgcctcagagaagcactcacccgaaatgacaatgcaggacagtgtccagcagtattgggagcggaagcgaccgactcgttatatatacgacgcggcgcgagagcgacaagaggctcgcaaagaaagcgaagctatagctaaactggcccggccgactcgtacatcaagcctacacacttccggcggtgtctagatagcccaggtccgatctgctagcatctacgcccttctgaaggggtggacgaggtaggcgggaggcagctgcacaagcagttcaacgcgtgctttgcaacaaggtgttcatgaatcgatgtataatagtacagtgcggtggtccgcttgcggccacatacgaagttgacgacacactatgaatacgaaatgagaaagccttacaacgagcgcatatgccgtaaagagtacatgcggaaccacaggttagcaggttaccgcttagttcttccatctgcgaggccatgaacattagcaatctgtcgacttgaagtattggcaaatgcgactcacatcttgaccgtcttgtctcgcccaccgctgactaccttgtccgccacaaagtctacgcagtaaacctcgtcggtgtgtcctgggagatcaattcggatctttccggtcttcaaatcccagagctaaatgacaaaaatcatcagtttgtgccctgcaagccacacattgtgtgccagccatgcctaccttgagcgtggtatctttgctcgcactgatcaatatccgcgaatccgcagaccatgccaaccgatatacggcagcgacgtgaccccgcaacgatgccacgaacctgtcaagaaggtcattcgcaatcgttagagccctggggcttcctttaaccagatgatctccctagctgaactcacttgccggtcttgccatcccaaagcttgacagcgttatcgaaaccggcacttgcaacgaggcgaccgtcagggctaaaagcgacgtggttgacttgcttttgatgaccggtcaaccgggcaacgggtttcttgatactgttgccggcgtcgttgacgtgttgtggtgaccacaggaacaatgtgtggtcatcggatccggaaatgacagtttctggggtgttgatcgtgtgcttcttgtagcgagcgagtgcaagtgctttcgcctcgtcatcgtctttgggtttctttccgtgatgatcgaagggccccgtccggaggataaagtcggtactcaaggcgagggtgttcacccagtgagcgtgctcgttcagagttcggataagttttccctgagtgatcccgcagtataagccaagtgcactcgagaactgacacggcggtgtttgcttacatcttttgcgctccagatcttgatcgttcggtcactacttccggtatagatcagaccttctccgccccacctgacaacgttgacactggcgttgtgtccggctagagtgaactcggcaaatgattgagccggggaccacaccttgactgtgccgtccttggaagaagaggcacaacgaggttgcgtggcgttactagacagcaaagcaagattactttcattcgtcgttccgctcgactggttcctgcttacagatgaataggttcccacgacagactggtgatccacttggtgtgaccttttcgtgcatctccgatagcgtttccggtcagaggatcccagaacctgacgtgaccgtcgtgacctccggtcgagacgaccctctctctgccttcccactcggtgcacagaacccaacccttgtgtccgacgagagtgtgttttggtagctcaatctccatatcccacagtcgtgcggtagaatcccctgaaccggtcaccgcatatcgtccagtgggcgacaaggagcaacaaaggatgggttgggcatgtcctgaccaagcaatgtgacgatcagtctcttgctgtttgagtgaggggtcgtgcctgaaactcaccgctcaaagtagcgctacatcgaccaacgcttcgcaccttgaacacggcttgaggttcgcacatgacctcgaagacatcttcgggtgagaacccatggtccagcttctttgctcctggtcccttggcctcgagcacgtcgtccagaatgttaccattgatttgcagacgcgacgatggcaaaggagctgctgcaggtgcccgagcgagtagatcagcaggcgggggaggaggagcgtttcgagattggatgtggaaggcataaggtagcggctcttcattctatgagggcggagcaacataagattggcattgatcgttagctatcgcccgtcatgctgtatatggatctggaaggctcacctcgcccttgagcttgttcacaagcatctgcagcgcatctcgaccagtgttagcaggcaggttgatcgccggaccgagtggtgtaccgtcttctgagtttttgaattggacgacaatgttgggtacgaaacgttcaggctcttcgacagctttcgtcggcttgacgtctcgttcgtgcggtacattgtgcagcttttgacgcttaggaggcggaagttgtgtggacattgcggcgagtctggcggattgttccgagtttcacggagactactatatttcgtactacggatttgcagcactaccgacggatgagaggatgttcgagagtaagaatcgcaaaatctccgctcaaaacatctttgaacatcgaatccaaaagttcgagatgataattatcatcgttgaccccgctcaattcacttccgggctaacgtaaacgagatgatcggaagcaaaattttaatcacgtgacgtcgctgaatccgtccatctcatctctgcgaatgctacaactgatgagcatgtatgatcatatagatttgaagatcgtcaagacaccaagtgatcaatgcccattctacctcgaccctgtccatgtgtatctcgggaagaaattccggaagagtcactctctcgtaaagagtcattgttgttatgcataggattcatcgactgactcggtggcgagatcctgggttttaccgggtccgaagaaacagcgcccctggccggtctcgccgggcggaaggggtcgaacgccgatacaggcggtatcgcacgagatccagacgaaccggctccgcttaccatactgacagaagccgggctcgattgcctcgaaagttgtcgtcgaatcaatgcaggcaggacgggtccgcgctcatgactgctgcgatattcccgccggcttgctccgacttggtgaccgggattcgtgatcggtcgtgcgctggctcgaatgttggtatcgagtccggctggagcgctttgtttctttgataatctgttcggagtgcttagcgttgatggtcccgggcgatacggatcattcgggtgcccgatagcggttgaagtggcatcggggtggtattggatgaatggcgacggaagttggtgacttgctgttggatccagcaattcgtcatcctggcgattgaatccatctgatagggtagggagagatgatgatacccttcgcctcgaatcgcgctgtcccgtaaaggcgtgccttgaccccactggtcgtcgttcctgcgttccggtagttctctctgaaccggtcctgctatttccatgtgatatcctcatctgactcctgggctcgggtcgatagatcgctgtggcgagtccagggtgctcgggcagtccgtgacagttgagagtagagcgttgtggttggtagcgcttccggatcatgggtggacggatcactcgaggattgattccttgctgaacgagcgcctctgcaacgcgagcacttatatgtcagctgagtgatcagtccaccgtttgcacaagtgaagcgttcaatcatacgtggatctattgagaaggtacctcgctcgtacactcggaatggattggacctgaccgacccgcaaccgaccgtccggcctctgagagcgtgaggagaaatttcagccacaagcttgtcgaaacggaggaaagacagtcccacgcgggactcactcgatggtcccgaacagagtgaacctgagatggtacagaccctccatggctcgcattcgtaggtcccggaagacgaaccgacatcctcctataatggaagcaccatcattgccacgctcaaagttcggcccaaccgcagtcggtccaaacaaggctgctagcgggtcaaagacgctagcgtcgttggcttgagggtgtgcgagttctaatgtgcagtagagtatcgcagagtatagtatggggtccggtgacaacgtcgcgggatcccgtggacgaagatggcatatagggataaggtccagaaaatctgcgcctggataggcagcacgagggtcaggattgcgacctgcgatgacgacccgtccgagaccgaccttgacaagtaccggcacgtaaaggctgttgggatagtacgagtttgtatcggtccagtacgcaggagtgaggcgccattatcaacggcgacgatatcgactggtgaacgcggccgactgggtcgaggacaaatcaagggagccgatgagcatgtcacctcctgagcaacatagaccccgtctgttatcatacaacgggtcagagtccaaataggacaataaggaatggtatgatgcgctataccctggaagagagcataatcatccggaagacaatcgacaggatggtacacgagcgcgacgatcgtcgatctgaaacccctcggccaggctgacgggtttctttttgtacacgaggccacggtacggtttacaatacagtcaaaggaggttcctctgctgtaaaggtacggcgaggaggagtagaataacgtagatccctttgagccaaaggagggggcttgatgttgtggcgatttaatcggtcggaagcatcatgtgcgaatgatgacgctcgcatgctacaagccgtcgagggtccaagatcgacaaatgcctagatgcagatgatagaaccagctcggaaatttcaatcaacgttgcagttcggcaggtcatttagggaacgaatgacttttcatttcagggtcgtgccgcatgctaatcacgagacgcaacacgacaagctgatgcgcgccacggtactggctggctgggggcgtttgcagggttcgagtgaccttcctttgaccgcattgagcggtggccgcggcagtgggtggcgaacgtctcgtatgacgaaatgtatggcggctcatccgcggtacaatcagaagtgatgacccgcgcatgatctattggctgcgatgggattcgcgctggccgagctggctggcccctgaagaggatctcttcgagtggtagtctgcatccgacgcgactctcagcgacggctgcctctttgggcgatttctctgcccctgcccctgcctctgcctctcgcgccctgctgccgcccctgctggctcctggtgcacgcgagtcatgggagcagcgaaccagactcgctcggtcggtcacttgcgacgtcgttggccactctgctggggtcctgggtggcgaccttcctttttcaacctaggacgctcctattcaagtacaccacactctgactcgtcgccacctcgttcttagacaattcgcctgatctcgttaaaacaccactcaatccctgccactccatccccgacgacacacacgtatccctgacgaccgccgtccagctttctcgcctcgaagaaactgtacgccacagacactagctagacctcgcacacctaccgactcgaaagctggcatccaggcggtttacctttaatcgaaggaagcggaagaggaaacggaagagcacaaccaaggctctcgagtagcatcgctcaatcgcaaaaggacacctcgcacactttaacggctttcgtttcgccccctacctctcttcgagacggtcgcgcgctcgtcaattcgcgccgctgcacctctgaggtttcacgactttcaggtcttccccttccatttcttatcaagcacgactggtcgatacaatgtggttccatctccattgaaaatcgcctctgtagcttattgaaaacgaaaagaggagacatctcttcccggatccgagcggaatcgtcaacgaccttgacgccgtctcgcatacggaatttacgaacaacaggacctagtcacgactactagtccctgtccggatctcgcatactgccaacggctctcaggacactaggaaatacaactcacgacacatagaaaaccatcgccactcgacactttcactatgatgttccctaccactctcacccagactatcaacatgagaacccaaggaaatgtcattgtcaacactgtcgccaccatcatcttcgtcgagtccgttgccgttgccaaacgtcaataaagagactcgacgaggaaatcccgcgtacgaacgcaaaacgtaccccatcacacacgcatctgttttcggaagaagaacaaaaacaccttttcccctctctaccctttcgtcaaacttggacacccgtactctccgcaatctcgagtttacttcacagaagtgagactcgaaaccgcattcgtagaaacaggtatcaccagctaccgccgacaggacaggaaaggaaagacacggtcttccaggtattcgctatcggacaacaatacaacatcaacccccataccccctcatccacaaacatcatcatctcggcaatcagcgagatacataatacaaactcgagacgatggagcaacccaacaccccccttccttccgccttcctctcctccttccttcccgggtcttcataccccctgccctttcactcgtgcgatcgccggcgatgggatgacgagcgactaccaggtaagggatcagggaagagatgctgataatcacttttaacatacacgccgagactcgcatgtactcgcaagacctctagacatcctagagcgtacacggtcggccttttatataccctgccataatcagagtgtcattctctcactctttcgtaggacgacccggacgcttcctcactcggccgacaaagatcagtctcctgtgaccagatattaccgactagcccatcacgtatcacccatctccacctcagagtctcatcttgtcaccccggaactagggtttctcacctcctagatcgagcgaggaacgtcgggggaaaactttcgaaggcgcgaatgaccacggggtggtagctcgaggtgttgttcggaaaaagcggcgtcgtcgtcgtcaaggatgagtctcgactcgatggacattaccgtggcggacgttgacgagttttggtatggtaagttcccgctggaagagtttctcttgcgagagcgagagaggacgatcttctcctaccgacaacgacccggcttggtactcatttctttgatctggtgtcgattcggtgtacggtctggcagaattggaagagatcctcactctcccgggagcgatctcgctggataccctggataacaccttgcgtatggtcatctccctcttttccagctcacacggtaagtccacctcggacccatgtcccctgtgcccgatcaccctggcctggtcgtactgatgccgaactctctcacattacgctgactcggtactcgttggactcggcttcgatcgccatctccacgccataccagacaagtacatgcaaagccccggagaatcgtcccacgcgtattatctcttgctcaagagcgatctcttccggtaccactctgagcggatgatcaacctcatcctcgctgaagctgaagaggcgagtctcgatccccttccctcccacccagtctcatcgctcaccttgaccctttgtcgtcaatttcctccgtcttctggcgatggcgataacacggcgacgacgacgatgatcacagaataccaacccgcacaccctgtacatcttgtacaatatcctcttgcaatggggttccaagcatcacagtctttttaggagtcatcggcggtggaaacgtctttcacgcgggttgggggacgtgttcgatgtcgagatcgacgaggtgagcggaccatggacccatcttgccccgccttgcgaggaaccatgacggtcgactgaccctctcccccggtcatggatttcctgctgttagcgctcggtggattccgatgggaacgctcctatcgaagctcgattgaggttaccggctacgaggctcatgtacgaggtcctccgtgttcagaaactttgcgcagaagaactaggtgggtgcacggcacggaaatcgagggtacttctaggcgcatgacaaagctgatctctttggttgtcgatccccgggggatggtagagggttttacggacgagtttatcaacaagcttttcgagctcgtagagacttcgaggaattacgacgaggagttgaattatgctgtgatccggctgatcgtaagtacatgatagaccgagatgtgacgtcgcggtgctaaagctcgaaacgatccgggtccgcttgccgtagatcgccttgaacgagcagttcatggtttcttccgctcaagcggtcgtgcataaacagggcgacctcaaagtccccgacgaaccgacgcacggcttgctctcgcccaccccggccgcaccggacgcgtccaccctcttgtcgccctcgcctgacttgctaccaccatcgctcgcaccgaccacgaggaaccatcatcgagcgcattccaactcccaccctccgctccacgtcattggcgagcacgcgccgacttttgaagagtaccacgcggggcaggaagggcaggaaaaggagagggagcggcagagggagagagaggtcgaggagaccaagggcaagaatcgcgtgctgggcgtattgatgagtcggttggggaacagcaagacgtttggcgaaaacgtcatcttcatgctgaatcggtgtcgtgagtcggtcggtcgtctcaagatccgcgtcatctgaagctgaacgtctgctgcagagaacactccggatgatctttgcgtgcagctcttgttgttgaagatcctctacctgttgttcacgacggcgggcacgcaggaatacttttataccaacgatctgagggtcctggtggatgtgtttttgcgtgagcttgtagacctgccagaggagagcgaggctgtgagtctttacgtattcgagctcactgacgagtttttgccgatgctaacgcgcgtctacgtcgacagtgccgtcacacatacctgcgagtcttgcacccactcttgacaaacacgcaactcaaatcggaaccgtataaacacccgcaaatccggttggttctgctctccttgacctcgcactcacacatccgcgaggtcgatccgacgacgaaacgtctcgtcgagcgatgtctgaacgcggattggggtgatggcgcagggcacgggaccatcgtcaccggtctgcgccatgcacccgggacggcagagaatgaacccttgagcctcgaagcgaatcacgggcacatggtcgtccccgagaatatcaagggcatgtcgatcgatcagccggtagaggagaagcctcccaagatgaagcggggccaaagtctgctcaggaaactcggtcggagtcagaggcaagtctgccgggctcgagctgcacatggccatcgttcgacggtggggagctgaccgttcttcttgggtgttacagcgcggaagatatgccaaaactacataaatcgcatctgaacgtgctcaaagtggatacgaatccctccacgctctcgttgcacgtcgtcgccgcggccgctcctcccgtcccgaaccgggccaagaagaagagcaagggcttgtcgatcgcctcgacggaactttcgccgcatcagagcgaatccggatggtcggatgctgaggccggttcgacccggtccacaccgatgggggcgagcggttccatggtcttgtcacctgcgacgtacgagacgccgacgagtgcggcttcgacgtgcggacgatcgtggttaccggggaaacgacggaaaccaccggcagtgcccgatcgaaaggccaagcctggggctcgagcggatacggatgagggaacactcggacgtagcaagactcatccgtcggcttggagtcccgagtttgaagcggacgatcctatgcaacgggctgggggggaagggaaggaagaggagaaaaaggagaagcacgggttagggttcgctgcgctcgcccaggcgttacaagaagccggaggaaggaggaaaagtaccaagggtaaacccgccgaagaggaaggtggtcgtacgggtgagacggtcgagcatcggaacaagggggatcagcaaacgccagcgatcgtcatcgagagcgagggcaacgaggggacggcgagtcccggacgacgcgaaggtcgatggtaccaagcgaccggatggacgacgtttgcgtaggagaggtcgtacgagagaagctttttcctggtgctcgtcatcgaggtatcgcgtagtagtcctgtttgcataatataaaagactcgaagccaggagggcgacaaagggttgtaccgtatatacctgatagatttgtttatacccggtgaatggtttggtacttttgattaattcgcgcgcaggtgtgtctttaatttggcttcaatcgtttctaccctactagcccccgcccagagactgacactcactcactcactcactagctagctcgggccagagttaccagctaccagctaccagctaccagctagcctaccgaggtcgaccttggatccaggcatgaagaacacaagtaactgttcgcaccacctctttcgatcggaaacacttaatgaaagattgtagtgatagatagattccataccatacattatcaaaatgtcgtctgacgaggaagaggattatgtcaccccgtcaaacggcgtacctactccggccggcttggactcgcctgctcagccagctatccggaacctcgaggccgagcaaggatactcggacgatgacgaggacgatgagcctatcaacgatactggtagggaagatcggatcgccgatcgaacgggaggtgtagctccggaagatgtcgtgagttgacaagaaaacaagcggtggttgagctcgccgatgtggtagaaaacaagctaatacgcgaccatcggtttcttgcaggatgacgacgatgccgaacaagcttcgcctcctcctcgatcacgaccagtagcagacgaagatgatgaagatgatgaggacgacgaggatgaggaagaagaccggcctggccctgagccttccgcacgaaacaaacgaactcaggatcccgacgaagatgacgatgaggacgacgacgatgacgaggacgacgatgatgaggacgacgaggaagaggacgaggaggaaggtgagtcgatcgaatttctagttgctatacccacatgctccgcgatgttttgcttatcatttgccccggatcgatccttagactcgagagggaagaaacgagtgagtacgggttcagactcgtgaaatcctaccgatgagcttatcccagtgaactatcacagaaacacaagaagaggaggatgaaccgattcatcgatatcgaagccgaggtcgatgatgaagaagaggacgaggaagaagaggaagactttggaggagctggtgagtgatcacgcatcgattcgagtcgaagaccatgctcattcacctcgatcacatatagcgggcgactttatcgaggccgagggagatattcccgagcgagactttgatggacgggcacaccgcgcgttcgaccgactagaggccgaaaagggaggcatggacgccgtagagatcgctagggaattgcgagaacgataccgaaaccagcatcgagagtatgacggttcggccaacttttcggaccgaaaggccaacatgcccacggccaaggatcccaagctgtggcaagtccgttgcaagcccggccaggagaggacgatcatcacgaccatctgcttgaaagggttcgccgccatgggggaagaggaggagtacggcatcttttcggcgttccaacgtgacagtttgccggggcacgtctttgtcgaagcgtacggtcgagactttgtcgcacgggcccttcagggcatctcgaacgtctacttgcaggcgggcaaatcgaacgaggagcagaagaacacgatccagttgatcgagaaccgtgatatggtccccttgttgacgatgaagaagaaggaggtgacgcccaaacgaggaatgtgggtccggatcaagcgaggaaagtacactggggatctcgcccaggtcaccgagatcaacaatgacgggcagggtgtcatcgtgctgctcgtcccgcgaatcgattatcatccagagaggagcaaggcggccaagaaacgggccgctggcaagcccgccaacgcgctcaacagtcgaccacctccaggtcctcttcgacccgactcgctcaacgaaatatatggacgaggcagttgcctgaggcggggtgacttttggatgttccagaacgagcaatacaccgacgccggtctcctggacaaggagtaccccatctcgtcgatcctcacggagaatatcaatcccaccttgaatgaaattagcaaatttcagggagacaaggaggatggggtcaagatcaacttggatgccatcgccgacgctgccaagaagtcggccggaagcaacattcgaccgggtgatcaggtcgaggcgtccgagggagagttggctgggctcaagggagtcgtcgagacggtcaccgccgatacggtcacggtccgtttcccacgttcagaggaggatcacgatttcgaggatcagctcatcgagatgccagccaagagcgtgcacaagatcttccgcgtcggtgatcacgtcaaggtcatgcaaggtgtcaatctcaacgacacgggtatggtcctcgatgtcgacaacaatatcgtcacgttcttctcggatctgtcgcaaagggaggtcaaggcgttcagcaaggacttgcgagaggccgcgacgatcggtgcgctgaacaaccgagtaggagatttcgagctgcacgacttggtcacgatcgatcctcagacggtgggagtcatcttccagactgagcgagacggattcaagatcttggatcagaacgggtcgatccgatcgatgcgcccacatcagatcaccaagaggcccgccatggaaggcaagaggaccgtcggtatggatcacaaggaccgagagttcaggatcggcgaccagatgaaggaggtcgatggcgaataccgtaaaggtctcgtcttgcacatctaccggggtctattcgcgttcatgcacagccgagaggtcaacgagaacaacggggtgtttgtcgtgcgaagcaagaaccttggaccgattgacgaacggacgacggccaagagcggacctgatctcaccaagcaggatcctcggctcaaccaggccgtgccgttttatgctgggaacaatcagggaacgagtcagcggtacctcgtcaacactcacgtcgtcgtcgtcaagggtactcagaagggtttgcagggtatcatcaaggatactcagggggacaaggcaagggtggaactcaagacgaacaacaaggtcgtcacggtgcctatcaagtcgttgaagaagaaagagtacgttcgacgcttaaagttgacaattatcagtgaagaatgactgaccattcgtcccatgttcccagccctcttactggtctcacgagtgaattggaaagggaaaggcggaaagacgacatggccatggccgacatctcgaacccacaccaggtgccggtatgtgccgtgccgcctttggtcaactcggatgtctcagactaacttggtttgcaatccttagaatacaaacccattcatgtccaatccgtacacgagcgggaacccatacgcaagcagcactccgttcggagtgagtgcataatcgtttgacaacgaggacgacgactgaccaagtaaaccatgtccgcacacgtttcactgctacaggctgccaagactccgttcaactctgggggcgccactgccaatccttacgctatggtgagcgatcctcaattccgttatcttgcgtctgtacgccgacaaattcctgacgctatctctgcagggcaatgccaccccatacatgggatcagcgacgccgttcggtggaggcaagacgccattcgatgtgagccgttgaaatgggtcactcgattgcaagcaaggtagagaagctaatctgacatccgactatcacagggaggaaagacgccgttcatggtatgttgccccgcgctgtgtcaaaccatggtccgatactgactcgagactgatatcaacccacagggcggtcgaacaccagccaacatggtgagttgctgcagactggcctgtagcgttggacgagcttctaattcgatttcgctggatctcaggggggtggagcaacaccattcggacgatctacgtatggtcagggcacagggtacggaggaggcgcaactcccttcggagcagcaccatatggcggcgcatcagcatacggcgcgcctgccatgccaggcatcggtgagcaaacaagcggagaatgctgtggctgggcccgtctaactttttcgccctcgcagaccctaaatgggcggtcggcctcgatcacattttggtcaagattggcaatacgttgacgaacaacccctacggtgaccagacctaccgaggaggcgcctatcaggatcaattttgcgtgctggattcgaacactccagcgggcgctcaatgccgggtcgtatcgacaagagaactgttgatcgtgccgtacgagttccttcatccttgcccaccggagatgccgaaccagaccgtcgtcatcatttcccctccagaaaagggtcggagaacattgacggtgcatggcgatcgcatgaacggaacgtgggaagtgcagagcgctcccggacgaccctacggacctggtcagctttgtcgtgaagcatgaccgcaatgatatgacgaggtcagagaagaggcgatacccatagccgatcgtgtacaatgtatcattactcgagcatcaagccttcatgtacatggccaatgacaaccaaccattgcagcggtcaacaccgctagccgggtgcaaatgcagatcacccggaagcatattcgggctttgtctctaattagggactgcacagggttccagctagcacaggttgcagccatgttgaagtaccatatcctatttagatatctctcacggttccacactgtcattatacgtcgtcatcaactatcagaatctcacagagatgaatcgcaactagtccacttgccagttgacatcgtctgacatcaaacctaaatcggccatctctgctcgcagcgagattgctaccgagaccgtatccacgcagatgtctatcagcaggttcagtaccccgaccaagacccggtcagaggtgaacctcgatgaacctcctgcaaagtcaaacagtaatgaagatcatgatcatccattactccttgaattgtcatcgctgcggacctcgttgcgcaagttccagcacgtatcgcactcgagctcgatgcagttgcagagcaagatgatggagtcgctgctctgccaggatgagaacgtcaggctgaagagagagctagaagcagccaagtccgagcttgatggccttcggtaggtttcgttcagcgcacatatccgagcgagattgactgacactgactatggcttgcagcaagtctaccccagacggacagttgccctcggcctcttctcaggctctatcggagctgacattagctcaccgtcgtctatcatctaaactagaccacacacattcctctttcgaagagtcgcaaaagctcgtcctggtcaaggaagctgaagctgcgacttggaagaaagagcgcgatgcgatgagcgtgctgctgcaggaatggcgagacagagttatccagacggaaaaagaaagggaggaagagacgattcggcgagtggcagccgaggaggaactgaggatcacaacgctcgccctgaacgagtgccaagctggaatgccttctgcccctgtgacaatcgaagcagcggcagagtcggacaatgaagtcctgttgaacatcgaaccgtcgaaagagacacctgctggtcggaaactctgctcatcgtgttccgccattatcaatggggagcaagctggaagtgcttcgatagcactaccccccagtcccagtaacatcttactcggcgttcaaggcgtacgccggcttctggctgacttttcatcgtcgctcggggcgtctcaggagaggatcgctctgctggagactctggcagacgagctcaaggcctcgaagaacatcgccatgcaggaagcagacgaggccagaaatcgatacgccaaagcgcagggggaattggagtcgatcaaggctgatgattttggagctggcaaggttgtagagcggtatatgtaagtctgggcacatttacgagccaagctgtgtgtctcgaatctgactggcatccgcgtgcagggcattcacacaaaagacgactcagcagctgcatacgcacatgcagaccgcaaatgaccgtctatcattgaccttgaccaacctccgctcgcaactgttcacgactcagactctgctttcgagggaagaatcgaggtccaagcagttgcgggcagcgatcgacgaattagcagaaggctacgaacgggaaacctttggcagacgccgcgaggtaggcttgagaatgaaagccctggaacgcgaggaacgtcgggaggagcaaggcagacgctgggtggatagagttcgacgggaacgaacgaggctcgatgtttctcccgcgccggcgagcaacaaactgggtacaagtcccagtcgacgaaccactcgactcaacagcttcgggggaggggccaacgtcggttcagcttcttcgacgagcttgtcatccatgttaggcgctcctttacccaatgattatgctcatggggaacagctctcgctcctgtgggatctcctcgagtcgggtctgcaactcttcaaaaatagcgccgaagatctggtggactgcatcattccggggatgacagatagagaattcgtagaaagtccgatagacgggcggaatctcagggtggatagcagcctgggtcggatcctattggcccaagagatcgtcctcggcttgacggcggacctggatcgcgagacgaagcggaatgtcgagctggaaaaggagagactcgggctgttgtctaacaagtgggacgagtcaagtcggggagatgattcaaacgcattcacgaaagcagagagcgattcaaatgttgttgattcgaacggctttgccaagctcggcgacggcaatctgaaagcggagtacagcgatctgccggtattaagcgtcggatcggaggatggaaatcctaaagcttcggacagaccaccggcctttcaaggagatacgcccgagctggcgcaacaggatttaccactttcaccgtcccctcgacccgtgtctacagagatcagcgccttgatcggcctcttacgctcacgaactccggcatatcggtcaccccagaaagcactacacgactgcgccgtttcattgagtaatttgcgccacactcgcaaagagctaccgaacgaatatcagacggcattgcagatccttctcgatggcatccacgacgtgatcgaagacgtccgagtcgaagtcgagatagctatcgctgatgacgaccgagccgccaaggggcatcaaacggtcctttccttgaatggagacgagtcagctatcaaggccgcttccggatttctcgacccagagcggacgaagtctcgggaatccaactttgctcgccgactgggagatgtcgagcacgatttggtcgagctcaagatggccatcttagatgtccaatccgagcaggctctcggtccgcaacaaaccgatctactagatcctatggacggccgccgagccgctgatccctttaccaacctgaacctgaagacggtcagcgtccgaacccccgctaccattcagaccacgctgacccggcctgccgtctctcctggtctgacggaacgacacgcgttggggaacaatatgaaacgagggtttttccctgcgctgaggcggacattctcggggacgaccccggtcatcccgctatcacgagctgcgagctcgaacaatgtgcaggaagatggagtgggagccgatgcgcaggctgtggatgcagacgacggggacgtagaatagtcagacatgtcaatcacatgccttccaatggagagatccccagtggaaattgatattcgaagtgatcaacgcttattatattttcagcatgcaaacatcggtaatctagggcgataccaagaggggcggatggtttacatctagttagacaatcggcgagatcgtacgaaggtaacaagagtaccagaccgattgttggaggagataaacggcaagaaagttctggttcccctcctcgatattcactacgccaactgcaccctggatgtcaaagtgcatgtgaatggatggccaattagaaggatgctgaacagatagagtattgaatcgctctttgtgaggacgatgtagggggtttatcacaaggataaggataagaatagagatgaggaaatgcaagtaaacacgggagcggcgccagggtggtcgcccgaagtttaggtctcggatccgcgtcttgtattatgacgaaaccctattcttggcagtcctgctgttaggtttcccgtcagatccgttcggccgtccgcagcaggcgtcgcctgcgatcacgctcggcacggggtaacgtttcatcgtcctccacctggctcctctccgcgagattggggcatgtcgacgccgtttgcgtcattgaatcatctgtttcatcagaattccctctgccttttacgccgtcccgttgatagggtttgttttttccctttgttcatcatttcatcaaaccacaacaatcacaaaggccgtcgtcatgttcagtagtctttctccccggtccccccgcccattccatcattttgcgcgactttttcaccatttcaccgcgttcttgacccttttgacggggatcgccttgatgggcaaatgtatataaggaggagaaatagacacagcattcgatagattccctttttcatcagccataccacaatcgacatcgaccacattagattcacctttctccaaataattcgatttctagtccccttttaacctcttccaagcccgaatatcaaaactctttcaatcagcaacatgcgtcttgccatcgttgccatcctctccatcctttcgaccgcctctgtaagtatccgtttcttgcatcagaacccccaatgtttctcatcatctgatcctttattccacaacccaggctcgagtcacccctcgtcaagcttccctggacagcgcccctcaatgcgttcccaactgtctcgccgtcgccccttacaacaagtgagtccctttatcctcttcctctcgtttcctgtctgatgctgatgtgtctacgtgttccccccacaaactccgatgacgaaaaatagcggcgactgtgatcctaccgactctgcctgtctctgccggaacgagggtaccctcgccgccgtcaacggatgtctcgccgatcaatgccctgatcagctcgccgacgctcaggctatcgctttgcaatacgtgtgtccgagatcaccggtctctagtcgcattgcgtgatgctaatgatatttcatcggcctcgacttgcagtgcgctgccgtcctcggcggggagaacacctcggtccaagtcacctccactttggcccaaggtcaaaccgcttccgagaccgccccggctagtacgaccgtcgaattgaccacctctgcgaccgagacgaccactgcggggacgacgacggccacggtcgtctccaccacttcgatcgaccccgccgcggcggccagttcggcggctagttctgcttcggaatcggccgggagccaggtcgagtctgctagttccgaagccgcgtgagtacgaatacgagtgacgggtctgatccgatagaattgctagtggagatcaagtagaggaggctgactggtttcgtgctctcttttctatttcgtcgcgatacagcgcgagcgcttcgtccgcctctgaatcgttggccgcctctgcttcgtcagtcgcctcttctgtgtccgaggccgcccagaccgggatctccaggtcagcgctaccatccttgatcatgcctggtatctcaaacaagcccgctgacgatagactgagcctgtgtgatcatgcagcgccgtcgccggtgtatctcaacgaatctcttctgccgcgtcgtccgcttcctctgctgtggccgagagcaccgggaacgctgccattgtccacaacgtggccgtcgggtccaccggatttttggccggcattctggccctcgtcgtcgctctctagatggaagggttatcgacgacctgttctaaccttcacgtgtgtgtgtgtgacgattggtctcgtgcacgacccgagctttaagcctttgtttctcatcttgtttgatctgttttacgcgactcgctcgagcggtatccgcgttgcgactattggtagaccagctagtagttataacctctcgctaccgttctcgtgtgcctcggcggtgatgatataataatgacccgtttcctctatcaactctgatacgtcagagggcgacctgaaaccccgattggccgcgcacactgcgcgtttgcttttccaatgccccactcgaccatcctgccggctgactctggccgtggtcttgtatggtgtgtgtggatgtatggggggcttggaaattctcgatcgaccgatcggacccgattcgctgttgagcctcgcgtgggcgctactgctgataaggcccactcgcccgctcccaaagccaagcccgagcttcaaactcgcgttttccaatattcgactcgcccaccatcgaccttttccaagaattcaacaccgaggatcaccttagataccgaaccttcatgacctggcagctgtatattccaacaaggtttctccatcgacggaagcatggtgggttagtggaaaaaaggatgggggatcgggcggggccaggatatacatgtatatatatatcgcacagacgtcaaaggatagcggtagcctcggggtacatccatttcccacctcgtctcctgtcttgattctgattcaaaccattctattgattgtcatcgcaatccacaacgatacgatatccacctcgaacccccgcatataagcgaacggtgttatcaaccagtcgtcctttcatcagtctcgctgtacgcaagcagcgatatataagacacagatcgagagagctatcaaacgtggtaggtcctcctagcaatcggatctttcaagatctttttgacgaaccttgctgatcaccgataacccttactacgcagaatctgacaacaagtcgaaattcggacactttacacgatgaggtcgatcatcgcccgttcctcgactctctcgaggacgtgtctccgtcgaatcgctactcctacctcttacaacctcgccgctgtacggaccttttccactagcccatcggcatggtcttccaccccgtcgacctcgagtttgaccccgaggcatcactcgaccacggccatctccccggcttcgaccgctcattctgccctcttccctcccactcacgctcctgactcgatcttcaaacccctggacacgttcgccccacgccatatcggccctcgtgaaaaggacgtcgactcgatgctctcctttctcgggtacgattccatggaatcgttcgtcggggagaccgtaccggggaacatcaggatcaaagagctcgacgacaaggatatcgccccgttgagcgagttggagttcatgaggcgggccgaaaggttagccgagaagaatcagttggtcaagagttatatcgggatggggtgagtctcggatcgaggcggttcgaggggaacgagatgctgatgcggtcgttcttttcttgaccccgatggatagttatcacaacgcgatcgtaccccctgtcattcagcgaaacgtaagtctcgacggaaatcggctgcggtcaagattgagcactgattgtcgtcccgtccggtcgtttccacccgcgtagctgtttgagaacccggcatggtacaccgcctacaccccttacagccctgaacagtctcagggtcgtctcgagtcgttgatcaactaccagaccgtggtcacctccctctccggattgcccatcgccaacgcctcgcttttggacgaatccaccgccgcggccgaggccatgaccatgtgcttggccacttcctcgaaatccgccgcacccaacgtcaaggacaaggtctttatcgtctctgacaacgtcagcccgcagaccttggccgtcctccgaacccgtagcagagggttcgggatcaccgttcagatcgttcccgatacacaactcgaatccgccctcgaaaaggctggcaagagttgtttcgggatcatggtccagtacccggacgttcacggtggcatcaaggactggcacaagctcgcctccaaggccaagtcgaacggtgtcaaggtcgtcgccgccacggatctcttggcgctgacaatgttgaaaccgccaggcgagtggggagcggatatcgttctcggaaactcggccaggttcggagttcccgtcggttacggtggaccgcacgccgcgttctttgcctgtaccgaggcgttgaagaggaagatgcccggcaggttggtcggcgtgagtagggacacgaggggagaaaaggcgtacaggttggctttgcagagtaagtccccagacgtcgtctgctctcttgcacccgcgcagtcgttgacatgcatctcttattgtcttacagcccgtgaacaacacatccgtagggaaaaggccacttccaacgtctgcaccgcacaggccttgttagccaacatggccgccatgtacgccgtctaccacggacccgaagggatccgacagatcgccggcaaggtcaacgccttgacttcggtcttgaagcgcgtcgtcgaggacgccggatgcacgattaccaacccgaacggacactttttcgacacgctctccatcgatgtcggcaagatcgggggtgccgacaaggttcacgtcgaatcggtcaaacgggggatcaactttaggaagattgacgacaagacggtcggtgtgaccttggacgagaccgtcgggctgctcgacttgaccgacattgccaacgtctttgtcgccgtcgcgggaggcaaagcacacacggccgatagcctatccagcttggcttccaagtcgttgtcattctcgaccgagacgctcggcaagtcgatcgcttcggcccccaaggagctcgccaggacgaccaggttcttgcaacagcctgtcttcaacacgcatcactccgagaccgagatgctgcgttacctctaccagctgcaagaaaaggacttttccctggtgcacggtatgatccccctggggtcatgcaccatgaagctcaactcgacctcgtccatgactcctctcgcttggaaagagtttggaggcgtacacccgttcgctcccgtcgagcagaacgaggggtacgccacgatcatcaaggaactcgaggatgacctgtcgctcatcaccggtttcgacgctaccagcttgcagcccaactcgggtgcttcgggcgaatacgccggattgatggtcatcaaggcgtacttggactcgatcggcgagggcaagagggacatttgcttgattcccgtcagtgctcacgggaccaacccggcttcggcgttcatgtcggggctcaaggtcgtcgccgtcaagaccttggctgacggatcgctcgacctcgctgacatgcgggccaaggctgaaaagcacaaggacaacttggcggccgccatgatcacgtacccctcgacctacggagtgttcgaagagggcgtcagggaggcttgcgacatcatccaccagtacggaggtcaggtctacctcgacggagccaacttgaacgcccaggtcggtttgaccaaccccggtgccgttggcgccgacgtctgtcacttgaacttgcacaagacgtttggtatccctcacggaggtggtggacctggtatcggaccgatctgtgtccgtggccacctcgcacctttccttcccggtcacccgttgatcgagactggtgggtctcaagccatcgaggcggtcgctgccgctccttggggttcggcatcgatcaccaccatctcgtgggcctacatcaaaatgctcggaggcaaaggtctgaccgacaccgccaaactgagtttgttgaacgccaactatatcgccaagcgactcgagggacactacactgtcaagtacagcaacaagaacggcagagtggctcacgagtgtttgattgagctcgccgactttgacaagcaggcgggattgaaggtcatggactttgccaagcgactccaggactactcgttccaccgtaagtggtcgccgtatttgcgaccggtagcctccatcatctcgctgacccatccccattttctatcttagctcctaccgtctcgtggcccatctccacgggtatgctcgtcgagcctaccgagagcgagagcaaggaagagatcgacaggttctgcgacgccatgatcagcatccgtcgtgaagccgaagacgtcatccagggcaagcagcccaaggacgacaacttgttgaagaacgctcctcaccccatcgccgtcttgaccgaggacaattgggacaagccttactctaggcaacaggcggtctaccctgtacccgagctcaagaagaagaagttctggaccaccgtgaccaggatcgacgatggtgagtttgggatcgtttttttttcgtttccgcaggaacctcgatctgacatgtttcctcgccacagcctacggtgacacccacttgatctgcacttgtgactctgtcgaggagtacgccgacagtaccgagggcgacatgaccatctcgggtggtatcgctagcaacacatagatcagatgctctgacggggcttctccgagtttttttccccaattctcctatataattgtcgagggtcctcaacaccctccaactctttaacgtaccttttacgacttcccgaggctcaacgccgaataacgatcatctgtttgcatcacacttgtaaaatctcaaggggtttcgcgaaaatacaatagaatctggtttcttcagaacttgacgttgcgacttctatccaaccacagagccttgacatgtccgcgagggcggaggtccctatcatcgagaagcaacgatatggcaaacggggattgaaccagaattattgagtcgggcgattggactgtccatcagcagcagcgaacgcttacggcagcgatagcgagttcggcctcgggctacgatggcggccttgacgcgtgacctctgacccttgtttcactatgacgatggaacgacgacggtgctcatgggtctcgcttccgtttgtgttacgggttgcccctcgtatgcggcctttccaactaggcgatcatgctttgcctagggcaatcaagccttggcaagatagaagcgggagcaaaccggccaaaggaagggtttcgagcgtcgaaaggagggttctcaggtaggcgatcagatcagctgtgcagttatcaaatcaggtggatcgattagtcaaaggagggtatgcttcagtcgctgcggaaaacgatgagcggatcgagaagctttcagtttgcgttgaggaaagctcaaatttccacatgcagttgcgtataattgcttgaatcgctaagctgattgcgcagctaccggaagtctagatctacgttccggatctcagaacaagtccaaccgttacctcaggcttacttccatccgactaaatattagcggaattttcgcaaacgtcatccaaagtgcgagatgaagctggtcgccttttccgttactcttctgctggctggcttgacattgatcgtgagatggtatagcgacccatccgcaaaggcatcctgctaattataaatggttgaacaactaggtcgcccagaccagcggagacgctcctccttgtgctcagacctgcatcgaccgacttcccgactctgatgtaagcatggcaggcacgctccttgaccaaggaatcgtgagtctgacgccgtaacttgtacagagcaaatgtgatgcaacggatctcgcctgccggtgcagcgatattgatgtcatgaaggagatcatccagtgcattatcggggaatgccccgtgagtcgcgtctgcagaagcttttcgagcatgatgacgaggatattgacgtatatgcaaccgataggagagcgagaagatgcctgccaacagcgcattcgtcgactactgccttgatattaccattccgaagcctccctctgaagcctcgtaaggtttccacgttctgagaaattgggagcagcggttgactaacgtatctttgtctctttaatctgcgtttgtcgacacagtcttttgccttcgtgagtgcctgatgccgctttcattgacgatcatcctaacgcgcaagcggtcttcgcttacttgcccaggtggacttctcatctggcctctatcgccgagatcaccgcaacggcgtctcgacccatggctggcggggacgacccgatcacgacgtactctagtgtccagttcagtcctaccggatccgctctcgatcccgactccccgaacgcagccatcaaagctgcttcgaacctcaacatttcgagggccgccgttatggccacagtcgtcctggcggtcgccttcatgagtgccggtctcatggggtcttgcatgtgatgcgatgtcgcccaagccttctgcgcttgcgaaatttcgctggatatgatttccgtcttaccatgcctcgattatacttttcttcatctgttcgaactatccagaaccaaattacgatagaatgccagtatgacctgtttcacacccacaaaagatccagcctttgaggattcgctatcttgacgcggacatcctaaacccaccaaatgtccgtgctgaatcggtcgctaggtctgacgacatcaccatcatcatcaccaacttgcgattcctgaccgaccctttgccctttgacggaatgtagtctaagggcttgttgacaccaggaactcggcggttactagtctagaccacagcgacatatcaagctcgttcactcccaataatctcccgcatcgactggcgctgttaccgctatgatgcaagaatggcccgttccgtatagtcaagcctctagcatgtcgctgtcgcccctaccatcaggtctccctcagacaagtaagtgacacgactttcccaatgggcagcgtagcctgagtgctcacaaattatccattttcacgatctcctcatctatctaggggattacacaggtgagctggattatcttcttggtgaagcaggagagatcgcttatttcacgcttattctttgacgtgacataggaccctggttccgtacccagctgatgctctcgactacactgggagcgttctcgctgctgatcttcgagatagtgcgacggcggtggaggcgggtgtacatgggtagagcgttgctgaagagtaagttgtcggctcaagccgatcgatcgagagtacggtttcgtccctgatctagcaaccttccgcttcagccaaagacatgggcgatccgtcggaagatcatcaagggatgctcggctgggttcgccctgtattcagcatcagtgacagcatgatggtgcgaacggtcggtctggacgctgttgtggtcagtcatcgcgcttaaatttgttgctggtagctataactgatcgcctccgaccgtgtgtagctcctagacttcatgaggacatcatttctgtacttttcgatatgcgcgggggctgcaactctcatcttggttcccgtaaaccttacagtgagcggaaatcatgccttgcgatgctacgcttgtgctaaggtatgccattcttcttcagcgcaatgggtcgactgacgacgatctccctgatccgagcaccggcaatgataccgacagcaattacacttcaacctactggagtccactatactttactgagagtagtcacaaccatacctcgaagcggaatactacccgacaaaaccctacgcttatggatctagttatcgatcctcaaacgacggtcgggttgcacctgctgtttgtctatttcttctcaatcctggcactgtatatgctgcacaagaacttccaccgatttttggcccgccgtcggatcttcgcgctggctcgaaagagtagcgtgcctgcgaggaccgtcctggtaaccgccatcccggaacacttgcgggacggccagaagcttcaagactatttcgagaatgactgcggatggaaggtcgagagcattaggatggtgaaaaacgtcggaagagaacttcggcaagcactgcatgagcgagagctagcgatgcgaggattggaaaaggcttggtggcggtacagaggcgcgaaaggtctcggacacatccgccttcctgaacaggatgaggataatgaagagaaccgacggcctgtcgaccccaacggtattcagtccggtgcagcaactccaagtcgatcgaacagcaaagcccgaccgcctcccaaaacccctgatgtgggattggcattgtcggaagaacccaattggggcgaagtcagacgcgagcacgacctaccttccgccagtgtacctccgcctttcctcgctgatcgcgatctcgagattggcaacgaaacagcatcccccaatggggaagaatcggattcgaacgacgtcagctcgggaatgggcgaacgacccagcactcgagtgccgaaatcgacgctgcaaaaagccattcctattcttggtgagaaggtcgacgcgatcgattactggcaggacaagtttgaagcggcagacgccaaggttcaggccctccgcaaaatccatgggacaaatagtagcagtggccgctccactcccggcggcgcctcaacgccgcgacccccgccacaagacggcgccgaattactgctagagggtcacaaagaatgggagaccactgaagaaggcttcgtgacgtttgaaagcattcgagaagctgtaagctgtttgcatgggagatctgtgccaagattgcatgggccaacccctcgacttgcaggaatttgcgtcccaggtagtgcactttccggagcactccgaatgccgcactgctcttgcgccggacccagacgatatcgtttggaataacatgggcatgactcaccgcgagcatatcgtcaggaacatcatgataaccggcgtgatgatcgctgcgttgcttctatggattcgtgagtttagtgcaacaatccctcacagataacgctgaccaccgtacaatgtttagctcccgtctccgcactggcgaccctactctcattcaaggaaatcgagaagatcgcaccttggctagctcgattgatcgagaagtcgcctctactcgccgccctggtccagaccacgctaccgtccactgcaattctgatcttcaacgctagccttccctacctgcttgagtggttatgttatgtccaaggcttccggtcaaagtccgagatatcgacatcgattcttaagaagtaagtgtcacccgtaactattccctgtcgacaaattgctcacccacatattgaatagatacactctcttcctcatcgtctccgttctctttgtgttcttggtagtatctacgatctttgacttgctcctgaacctggccgggtccccggaaaaggttagcgaacgcctatcacttccgcctgcacggtcactaacggggcatcctcccggcagattccgaaaaagcttgcagctgcactgacgcaaaaccaagcgagggcgttctctacctcatatgtgatgatttccagtaagcgagcagctggtacgaggatgaaatcgatgcctgccaactgatttgagtcacgttcgtcaggtcttggcatcatgcctttccaattgttaaactttggacagctattctggattgggctgtaccgtgctttcttcaggttgacaccgagaggtaagtcaatgaggacccgctatctgcttgcatctcgctcataactcgctcgatgccaacagagtttaccgaggtctatgcgcctccagcgatcaactatgggatggtttaccctcctgcgatcatggtattcatcctcaccctgacttattcagtcatctcgcccttgattctgatttttggagccatctactttggcgtcggctgtgagtatcagtttgcccttccagcatgaccgaacagctgacagagcgatttcttccagatatggtgtacaagtataagcttatatacggtgagttgagacttggttgatcgcctcgttaggcaccagttgattgaccatttttccacccacagtctttgtcaacccatacgagtcgtcgggagacgcttggcctacaacattcgcgcgcttggtctggggagtagtcgttctccagatctttatgaccggtctgtttgccgcacggcaatcggttgtcgcatccaccggaatgattccgctcttactgggaacgatcgcttggagctatacgatgcgggaagacttcaagggcctgtcacagcacacgccgcttgcaagtatcgccgcggccgatcatgccgtgagtatagactttctgccaaagtagactgatcctgattgaggatcacggctctgatgctcccttcaatcataggaagccaacgacgaccatccggtatctgtgcgatacggcaagctcaagggttcggacgtctatgcccagtatgagttggctgaaaagcttcccaagccatggatcatggactagaggtggaggagtgtgtgaagcatacataattacaatcataccacgggcacaagtcccgaaccgagagacgatactgtgcgtgtcacactgttccatcatgtctgtatgtcggcgagcatacgggtgacgacgagtgcggggcaaccccgggtcaattgtgtatttgcttccgttacatccggcgggtgatgacgagaatgccgagtgggcgatgatgaatgcatcgaccgacagcatagcacaacaagctaacaagttataacgaggtcactcgcatctatatggcctgttcgaagcgtcctcaaattcaccgcaatcctcagatccttcttttctgaggtgcctctaaagtagcatttcatggccatatcgcaccgatctgggtcgacccaattcgccagcagaaacgccttctgacaagcacccgattcgcccacgcgatcattctcagcatgagcggcgctgacgcaggagtcgtcaagctcgagcagagcgagaagatcatggacgaagataagccagatatgctaccgaccacttccgagtctgttcaagatgtcgcaacgaaggaaaagaccatctatccggagacatcccgcgcggagcaaggaaaggaggatacgatcactcctactccgacaccttctccgcaccgaactcgctcaaagccaaagaagggaatcctcaaaccaccacgaccgccagtcaaacctggtctcggcggcaagcttcgggacgcactgggatcgatccatcccaagtttctcgactacgctgcccccggcgctaatggccaggtcgcagcggctgcccatgggatcgcagctggacctgttgggaacattgccaacggcgtcatcgagggtgctggggtcatcggaggggctgtaggtggtgcagcagcggcggtcgtcgggacgtggggaggaaagctagggagattcgtatctggtgcgacaaattcgtcgcttggcagtcaggcgaccggtaatcaaggcggaccatcaatacaactgccatggaagcttcagaccgctgggacatcatcaccaaatcaagagaggagcatgaatacgaatggttcagctcgaccagaatctgcgctttcgaatcagctttcggcactctcggtctcattaggctctgctcagactccccttccactagattcccacaaacccctcaaacgcgcttcttttctcctccccctcatttccattacatatcctatatctagcaccaacccaccttggtcagacaagatcctcgccgatcgcgacgaaatcgaacgcacgaaaaacgaagaggtcgttgcgattactgcgaaagagtactggacgagggggaagctcgttgcgctctacgagactgcatgtaaagctcgggaagagttgatcaggaagggggttgtcagcggattgactgtgagtgctggcgcatcgcattccagtttatttgccacgtggacctgatgtgggctttccgttcaatagcaggccactggtgatgcaccgacaccacggcagctgctcttgacgtatcactcgcccgtacctccgggatattttctcgtcgatcctccgttgaacaaacactcggcagaagcattgtctgacgtcttgtcgctcgaatggggattgacgagactggcgctcgaaggcggtgttatcgatcatgacgatgtgagtgacacgtagaagcgtgtgaccgtgtccatagcctgatcgacaacgcgttactttctagtcgctcaaacctatactacacgccttgctgatggctggcacattaccacatctgagtattgctggaaatcgcaagatcaagtcgcctgggtggagaatggtagccgcctacgtccgcaaggtaagtcatcagacaaggtaatcgcgctaaatcaccaaagatcgacactgacaatctcccgctcgactgtaggctaaatccttgcgatttctggatctctcagacaatttgatcgacaaacgatcagccgattaccttgcccaggctttcttggatttcgcttccgatttatcaggagaatcgacgataccagatgaagagaaagaaaagggatccggccagctggggcgaagaggattcaacctgcgtcgagcatcgtcgttgagcgagaccagagcgcgttcaatcgggttgcagacattgcgtctggatggatgtagtctgcgaccagcgagtctggacgcgatcagtaagctgcttatatctgtttacatactcgcatatattcatgtctgtagcatcacttttcctctcaggctattcgctacgacgctcgaatttaaagaatttgtcgatgcgaaggaacagaatcaacgcttcgggcgcggtcgctatagccctcattattcgtgattatccagacaaccggcctactacggcgactgtcaacaacggctcagtctcccatggcgacgctctgttctcccgtttgaatcaagactttgcacgagtcggcacaccggatctcacggagggctcgcgcgactttcccatcccgcccacacatccttctttgacgctcgaggccgagccggaaaagctcggaccgctcgtgacgctggacatcaagggcaacgagattcgggtatgttggtgaagcaatccagggctcgcctgacctcgcactgacggctgcctcttgatagagtggagtatcatatatagcgcaggtcctcaagcggaacaagaccctcaaagtgttgaatctgagcgacaacaaaatcgatgcagcaggtctgcaaacactggcacaggccctggtgagtctggccgaccgatcgcgttacgggctcgactgacaaaggcaccaccgtagaaattcaacaccacgctagagaccttggaccttagtcataatccttgttgcggcccaatcttggatggggtaagttcgcaccccagcttcgagaaggaggcttcgagattgacaatgtacgaataggtgattgcattgaaatccgccctcgctgtcaataccagcctgaagcggctctacctgggatcgaccgggatgacgactgacggagctgtcatcgtggcagaaggactgcacgaagcgcgacacattctgcacatcgatctgaccgacaatccagcgatcggtagcgatggcgcatcggcgcttagcgtggggatccgagccaactccaccatccgatgcctagacttgacgatggatcactcggacccggcacaagcagagctcgctcagtctttgatgcaatgttgtatccgcaacaccgaggcggcgatcgaggcgcgagacggtaagatatcggacggcatccgggacgcaatgtgggcgcccatacgggaatcagccctagtgcggcaagcgaaagaatacgacgagcagcgcaacatggaggctgtgcggaagacgatcgacacgccagcgggtttggcaagaagcgaggtgtatacacttaaaccgggagctgtattgaaggccaccgaagaggtagcgcagtatttgagaggcttcaataccaagcacaaagacgcccccttggactctactgaacagcagcgagccgtgggtgcggtcgaacaagcgaaggcattgctcgagcgagtaggcgatcttattcaagagacagaagaccctgaacggatggaacgcttgctcgcggccaacgacatggttactcctctggtcgtagatgcccaaatcattctcgcagctagtcagaaacgcaaggtcattcaattgcaaaccaaaccgaccatcaacgtcggagtaaccacagcggggcctactcggcccgtggcaatgccagcgcggcgacatatgcggatgccgtcccacgagctgtctagtccgaacttttccttgaccaactcggatgatgatgacgattcggatgccgaggaagtcgccgagcccagcattgtgcaacagccccagcccaaagcacaagcgactcttgcagggacaggcacgctaccgttcataaagaagaagaagcccatcgcgctggccgggttacagctcggtgcgttcaatgttcaggtccagagggacacggcgacaggttccgacgaccagacaggcctcaccgaggatcacgcatcgatggaacctttgccctcgccactcgagcgagtcaacaaagactggctagaagaggagggtgagatcttccgcaagggtttcaaacttggcgtcgcagaagagatcgaggagagggaagacaaggccgagtctggtaacgttctgaagcaaaaagtgagtcggcacaacatgcgcagacctggaaactcttttcaaattccccgattgccgcgcagatcctcgaaacgaatgtcgcccgcacacctcaccgacctatccagcatcaggtagacgaggacgacagcaccaccgatgatgacgaatagaagttgaaagccatctgaagcgggcttccctccctgcccttgtaactcacgacccatgacgcacgatgacagaatcatgatattcttggctggtgttcacgagggttgatcgtgccgcaaatcacctcctgttgagagtggcgaacggccatcctgatccgcggacatgtacaaggccgacgcgacttctggactggagggtcggtcgagcgtccttctgcgcatctatcactgggcggcaggaacgttacgaggtctgtgaaaccttgaaggcaaaggcgacaatactggtgcgatgtggagatgtgctggtaccatacttgaagatgttgtattacaacttgttgacgagagatgaccgaacaactaaatacaggagggttgatggtgtctccaacaacgcctgcgtcaggaaaagtctggataatccgcatcatcaaagtcaacggtgctggcaatccatacaacacaggattcacattttagcttccacttcaacctggccttgccaaagaaccccctcttgccctcaattattcaaattgaccatacaatacaagcaacccgtacttctgggttcacctcgcaggatccgatgcaatggcagccaggtagccaagttacttacggtctgtactagaggtagctaggtagggcaagctgattcaaatcgcatcgaccttggcggccttgcacgaggtgatgacgaagtggatggtgcaatcgggtcagcgcagggcaagcttctcgagatgcttgtatagctgtcaacggcgtcgctcttcaggtgaatattaattcagcacacaagatcgagtggagaaagcggaagaagtttgatttggcttggtacgacaagaaggaagaggtgaagatccgtgtagattcttggcctgaccacaaagacgaatacaaggtcatcgaacaggtaaggattccgtttctttgccttagcaagggcgcggacgacttgacgttacggtcaagtcaagatcgcgagtgcatacggtctgccattttcagtgcgacaacaaggggatgagacatgattaccacattgcggctagctgtgtagtgacgatttggacagaagacatcgcatgacgggccgcgctagaatcttttggtttcaaatggcacgggggattttgagtaacagaccgctgcgcatgcgagacgtttcgcctacgctaacacagcccgaacccacgacgatgcacatggtccacgatcatccggccagagtgttcccgacgcgaagatgtctcgtagcagcagctcatcatcacatcgtgatccgatcagaacgaacaaggaaactctgacaaaacacagatccatccatcccgacgatcccccccgtgtctccattccgagacgagagggccgcggtacaaggtcgacgactagagggacggcgggtctgtaccgatcgatcatgcatatcatctagcgttcgccatatcgcgtcctactgattgacatcatcgacgatcaggtgttcagtgtgttgtgggttggggggtggggtgggtgagggtcgtataaggggacccaaccctcccgcaattcctggacctcctaaacgcccgaccccgagcgacgatcaagggggtgatcatggaccaatccttcagcgctggggtaggtaactgggtggccgatgagatcttgtttcaagcgcgagtccacccggcttgtcccgtagggaaactctcggacgtggcgaaagagggggtttggagggagatgaagaccgtagtggataccgccgtcggggtgaatgcgaaccacgcaaagtttcccaaaggtatgtgaccccgccgtgtcattgatccggatttgtttgtgacgagccatgcagctgatccttgagaccccgttttcgtgccgtccggatgatagactggctgttcagctggagatggagtaaggggaaaaaggacaagaatcgcaaggacaaggacgaatcggccggattccggctggtcagtcccgttctgccctttgacgttccccggcaggtagtatcgttctccaagcctgataaataaaggtgccctctcttccatagcccgacggtcgatcggcgacattggcgttcatcacggtaggcggtcggacgtcggcctacgtcgaagagttgcagacgttaccagaaggtgtcgtctacaagcctcccaagaaaaagaccgccgtgagcactcgacgtctcacctcgccctgggatcgggtctagatcaacgctgaccacatgcgaccctatagaaagccgagagtgaagcctcttcctcgtcgtcatcagaggccgaatccgaactgtcggaacctagctcggggtcggaagaggcggaaaagccgaatcctgcggtcaaggctgtgaccccagtgaaatcgggcgcgaagaagggaaagaacgctcggaccacggtcaagaagtcggacgaggagacggtcgttcctgccttcgaggatgaaggcaagccggtgagcctagagagtccggttcgcacggctttgcttcgaccgacaccttgccatcttcgtagaaacccgccacgaaacgcaaagcggtagatgcagcgggaccggctgcctcgaacagtggcaaaagggtgagtaaagctcgtccggcgactccgagtgccagtagcgtattggctgagctgatcaccgtccagcttcctccttttccccctcatcgcgaatattcgaccttgtccgctccggcgccactatgtgttgctcttccgacgcgcccccttgtgacgttcggaccatccgccgcccggacgatcacgaatctacgacccctcgccctgctcggtatcctccgtcgtctcgtacgctgagcagcaaaaacgtacccccaagtcggccaaacaggtcaagcgcgaagtgtcctcggggctctcctctgccgaggaagaagaggaaccttctgtacgaaatgctgcgtcggtcaaggacgagccggtaaagcaggaagaggaggacgagatcgtcgacacgggacgaagaagatctcgacgaggcagggcggcgaagtgagctttgctgcgattgtactgcctcatcgcacagctggcaagccggttcatgcgagacaatatatacgactgtagcctctctgtacctgtgcgactattagcatcctgtatccatcttgccgacggcctggccttgagatggtttgcaaccttatcgttggtttcatccaacatctcgattctcgctcgcgtttcctagtcgatcgagctttgaacaaggagcttgaaaagagtcccgagaccaagcatgattcccaatatgcaagttgctgcgcgtttgggaggtaaagagctggttgaagatcagatagggtgtctgagcaggccggcgtgcagcatcttcccgagtcactgcgggcaagagcaaggaagtgcttggccgggagattgccagtgttgctctgctgcctgtcgagacgctcgtaaacccttgccgagtgctcttcaggataggtcaggagaccatgtacggagcgcatatcgtctttggtgggcgaaaccggcgaccgccgcgagcgagccgactcccgaccgaggcgactttgaccgagctgtttgtatagacaacctcgttcaacaaaacttcttcaaaccctcccctgatcattgcaacgtcaactactgcaaaatgaccgttcctaccgtaccaccaccggccacgccgtccacggccaagacggccatgacgccgagcaccgccgcaccccgattgaaactcgtcatccgacggcttccaccgacattacctgaagagatcttttggaacagcgtcacaccttggctcgggaacgtcaccggaaatgcagagggagagagcaaaatcaattggaaacgctatgtcaaggggaaagctgtgagcgagtgagtacaagctcgtttcgattctcagggcagtcatgtggaaggtgcctttgtggatctcgtctcacaaacaacttttccgctctagcacgaaccagcatcgtgtcctttcccgagcctacgtgcagatgaagaccacggaagatctcactctgttcgctcaagcctacgacggacacgtcttccgagggaaagatggcgagttccggacagcctccccatctccaacccgctcgctgcggctgactgtcttcttctaacctggtgtacaggccaagaattccaggccgtcgtcgagtttgcaccggctcagaagatccctacattcaaatccaaacccagggtcgatgctcgacagggtacgatcgattccggcaagtctacccatcctgtccatacgtctacccgcccgcccaggtggactgatctacgtagactcgttcccgaccgggatagatgccgattttctgtcctttttggaaagcttgaaagcgcccattgtcaagcaggatatcaaccactctgaacgcaagtcgctggtcatgtccacatctgccatagccgaaaagctaatccatgtctggtcgcacctcgactgcgttcatcctgctatagctgcccctgaacagcccaaatcgactccgttgctggaccacctccgagaaactcggatggcgaaaaagggttccaacgccggtagatcttccgcagctgacggtcgatctggggggaaagacaaggctaaaggtcgagatacgggcaaggacgatcatcacggcaagtcttccaagcacaaggacgccagtcctaaaccaggaggagctgcggggaaaaaggatgggcacgtcaagtcgaccggtggaaagcaacgagatgctcctcaatcacttgccgccaaccgggacccagtcaagatccaggtcaacccggccagacagtctggtgccgcgtcgggaaaagtacagatccttcaacgagctgccgctcctgctggttcgaagcctgcgcccggacagaccgctgctagcacctctgccgtcccgactccactcaaaggcccgaaaccgcctcagaacgctcgttcgaaagcgccttcgtccgcgccaggcgatcaagaccccatcggcccagcttctggcaccaaggcaagtcgcgggaaaggcaaggacgcttcggcaggtggtcgtcaacgacccgaacgaggggccaaatccctgctttcagccgctctgaatgccagcactacgcaacaacaacaaggaggctcgtcaggaccgggcaaagggaatcgcggtccaaaggtacctcttgcgtctgcgacgaaaggatcgaccgagacggggcaggccgggccagatgcccagggcaagaaggatggcgacgaggcggacaagaagaaaaggacgagaacacgaggaggtcagggcaagaaaaagggcgagactgggagtgatgcgggtggaccgggggtcgacgtcaaatccggaggcacggccagaattgacgattaggtgtctagctgtctagcaggctttgaacgaacgctgccaaccagtatgcgatgacatgacgttggatgactttgagtacacgataatctcgtacaaacctcgtacaaggcggtcccgatttgcttcatacctaccgacccatggtctcgacagggcgattacatcacgttgtgttaacaaggcacgtcaagggagtcgccagagtcaccaccatattcgcgcagcccaaaatcaatacgcagacattgccagacgccagaaggttcaggttagaaaagaattgatattgattgtaaaggtaacaaaatgaaaacgactcgatattatcagtcgcgaacatgctcgctctcatcgccatctttacgtcaaaaggatctcgtcagatggtaaccgcatcttcgcggcatcttgcgctgcaactccttcgtcgcgtctagctctgcttgatgaacggcatggcgggggctgcggcaccggcgatcaagtcgagtttggccattttaccgagaggactaccggcgacggcgcctgcagcgccgactcccttctccgtaggcgtgagctctttcggtttttcgtcttccgcggcagcgactttttccttgttgtcagcggctccagctcgtcggttcagcatgatcgatccagcactagcgtcaccggcagctccgctgaatgcatcgagagcaattgacgatcagcacagagcatattccctgttccgcggacgacctttcgaacccacgtgtatgcgtcaccaccactaccacctcccatgcctccagctccaccgctcgcgttgccggtcatgctcttgcctccgttaccagtggtgactaaaacgtgaagaccgcgagtcagcttcatcctgactttgcgtcgccgctagctaaagacttacggttggtgcttccgttcgccgtgcccagactgccgccagccttcttgagaccgagaattccgtccataaagttgcgcttcttgacaacgtcgccgagaggaatggtgttatcaagatcggcgccgaggtccacgaggcgctttttcatcgatccgtcgaccgaacgcttcaaaccgagtagaccgctctgtccgttgctgggagccgaagcgaaatcaaggagacgcttgtccataccggtctcgggctgttcgagttcaggttgttgttgtccgccacgaccgcgagcaaaatcgaggaggcgcttttcttcaacgtcgcgagcgagaatcccgccgagaagtcccttgttaccggtgctggcgagctccgagccgccatcgagtaaacgcttcttggaaaggtcgcgagacagaatgcttcccaaaaggccgccgttgccgttgccgccggtcttggaaaatctgggaacccccgttcagcaagcgcttctcgtgatcattggtgtctcgggagaggatgttgccaagtagaccgttgttaccgcatcgagtgatttcggaacccccatcaaggagtcgcttctgcataccagaaccggcgcggtcgttgatctcggagccgccatcgagcaagcccttctctttggtatcggtgtctcgagagaggatgctaccgaggaggccgttgttaccgcatcgggtgttctcggatccgccatcgagaagtcgcttttgcataccgttaccggcacagttgttgatctcggagcccccgtccaagagtcgcctctggtgagcatgttcgtcttggtaatcgcgaccgaggataccattcaaaagtccgcctccgttgttctgaccggtgttcatattgctagagatctccgaccccgcatcgatcagacgccgctcctgttcgatgctgcggcgaaggttgagaggggcctctccgagaagccccttcgagtagtcgagcccgacctcgacgctgtcttgttgacgcttgaactgggtcccaccgactgcaccttgagcgttaccactggcggagacgccgccattgccgatagtgactggtagtacgtgcaagcagagtaaactcccgccaccggcacgcgatcagcaagacgacagacgcactttccttgcctccttggtagtcaaagaagactccaggttgggccttgccggcagcaaccttgtctttcataacgatgtctccaccacgagcgggactatcgggttcgcccctagatcagttaggcagagcaagattcaagtcgctagccagcactcacgccgcggcaccactgtaagcatctccaccatcgtcgcttccaatgataagatgggccgagttcataccagtggcaagggcagaaaggatgagggtgagagcagaggcacgcatattgatacgattggagtttgttaaacgagtgtggggcaggtgggtcaaggtatgtgaaggaccgacgatttaaagcgaggtgtcaggcggaaggaatgagagtgaagttgggagtgagaagcagttcatggtggcaaaaggggcgatcggttccagtggcctgggtttatatgtcccttgtcgctaacggatcagcgaatgtttctcaacagaacgtcgacttgcatcccccaagcgagatccacgcgggaaggtctaggtgtttagcgcgccgaaaaacgtccaaaaacgacgtatcaattgcgatatcaacagaacgagggaggaatatcaaattcggccatcgtgacaacctacatcagttttttccccatcttctacaatcatttcggcaaatttcagacacctatggccaaaacgggcgtctttagaaatgcaaaattaatcgattcagcaccgaagccagggtcttacgttatcgatctgaaacgcgcgtgccgggtaccttgatggctcttttggatccgattgtggcacactgtccgagttgacgtctccatgaggactgcccgatccactgatacctgttgtctcaaggtgagtcactcgtttcgccaacattgtacactggagtggctcagactacgagtgtcctcgatggttccgctcgaataattatgggatactaggcaggaaaacgtccttggtcgtcaccgagagagactacagactatgcattatgaacaatgaaggtggaaaacgtgcgaattttgcctttggcttgattttctcgatatcgcggcgcaggtacgaatagctagcagctcaacacaaaaaggcaccgaaggcggtagccagaaccagagcgaccgttccaccgaggtgtaaaggactgagggatgtgccggcgttttgtccaccaccgttgttaccggcggcaccgctagctgtgggctggcctgctccggtgctggtggcggtacccatgcttccgctcgacgtggcagtctgggtcgatccaccgctagtcacagtgaaaacgccaccttcaggagcctgtgcgagacactgagcagcagcagtcgaggcgtcctcgggagtgttgggagctagatgagatggtagcgagcatcaccaaagcgtcagtacctgggggccttggctgcctcgttcactggccttgacctacggttgggtatggcagtggcattgccggaaaagtcacaagcatcggccctcctgttctgactctcataatatgccgaaaagacgtaggagagcttgatggcgtccgagcagtaagacaactctccatactggcctgtcgtaccgtttccgccgatagtagcacacgtagcggtcgagttggtggatccgagcaaagagcaggtgtaactgcaatgtcataggcatatatcagtgactggatgagcgatcgagagtagaataccgatctgggactgactcgaggagggcgcccataatggcgggcctgccagctgtggctcgttcgacgacacaggagaacgagttttcgtacaaacaattgcaaacagtctcatcaggggtatcgggcaacgtgttgctagcctggaaggtcgagttctcggccgaggggcatgcaccttgggtgactgtcacggatgattgagcagggctgttgggcgtcgaggtgacgttgctcaactgagcagcgagtcgctcaaagtcatccgaggtctcgacgctgcagacaagtgaagcgtcggtaaatatatccacgttctttttccgggcaaactaaaaacgacgagactcacgtctgaccgtcagtaccgccaaaggtgaccatgccatatccatcgctggtagggaagtagctgaaggcgattccaccgctgaaaacgttagtagtcggggcgctatagagcgagccgacttcctgccaaagacggggaggcgaggtaatgcaactgggatgaagcacatgtcgcgttagttggtgcaaggtttgcgtctcggcatgtttcgagaagctcacccgtattcagacatgtaggcggctacgggcaggtttgaaaagtcgtcgacaatgctctcccaaccactagtggcaaacgtgctgtttccacaccactcgtagttgtctttacaaagggaaagagaacgtcagcgtgacatcaagtcgacttttgcctccgatcctgtactcactaagaccgtataaatcgagcgagatggtctcgtccccacaggtcaagtagttggcaagggggtctgggacgtaatgtcagtgatgaagttaacactctgcacaacgctgcaaggttagagcgggacctacccctgaacgcgggctctccgtctacactgctgtacccgacgagcgcgttgatgttcttgctacgcaggtaggccttggtgtccctcgcagcggccttgacgaaggctatcccattgtacagcaaaatcttcaatcatcacgtaaactagaagctcggcagttcaagtactcacgtccggcatcggtgttgactggcaaattgatgacctcgtttccgatgttgaacgccaacaggttgtcgtactgggcaaaagcatcgatagtcctgatatactcgttcaggagcgaagtggtccaagcgggggaagctcggttgatggatccgttgagaggcagagagacgtcaagcctatccatgtgaggaatattgtcagacaaaggacgatgagaccgaaaagtcgtcgagctcgggactcacaacacgtagatccccgcgtccgacaacgtcttcatgcatgccgaatgatcctcctccgggttcacgctgtagaccctgacagcattggctccaagttgttgcaggtaaggcagatcacgggtacagtttcctgccgatgaaagggggtcgatgtaagaggaaggttccgggaatccaccgctacgtggggcagatcgatgatgacggtcaatttatgaacttcgttatcagacaacgcatcgcagtcttcgtactcacttggcatcgttggcctcggaagaaggtccgacctcgccttgaggttggtatgcaactcccttgatgtagaacctctccccgctgtcgttgtagaggtatttacccgtcctggtgatccgggagattgcggcagcaggagcaggagagagggcgaggatcgaggtgaagagagcggtgttgaacaacatgttggtcgatgttgtaggtctaattggtctgatccgattgtcctgtcaattgagattatggtcgggaggatcgccgatttgttgatttcgacgtgagcgagcgagcgtgttggaagggaatgccgcgacggaggatgtaggagaggtaacgacgagtctgaaacgttacaccgagtcgactctgacagcttgcaaagtgtgacagtgtgacaaggttgtgagatgttgaaaagggagaggtacgagggtgaatatcgtccattaatcgcgagagtggagtctagaggaggcgagttcttgatttgggaggaccacgacgtcgccggcctcgggctgtgtcgcgcgcggcactgaaccgaagggaaaaagaggctcggcattcaccaattgctacatcgagcacacctgacaatcggattcaacatcactttccaacagcatcgacgacaccggccactggattcacgaggtacaagatcggatcgtaacataccagccgggtgtaggtgattcgccggactagacacgaaccagatactcacaataatgaatgacccaaagttgtgccgcgatccacgaccgtccctttgaatcgcgcgcggccgccttcaaaactgcctgctcagttgctagagcgagcgacgggttttccctcgacaaaaccccaactttcgatcgatttcacctgtcatcataaactgaacatggatgacctgctacatgtacccagatcaatttaacgctttcctctccatcgcgagagcgctatatcgagcgcggtcttacagatgctcgacggctccattcacgccgacgtctcgcctcagccgcggcattaatggcgctcttcgaccgcgctcctcccgccgcaaacgttcgaatccgtccgagaaatactacgggtcaggtttgatacgtacaaatcctctggacttactattacagtctatcatgtcgtgcacaccgtgaactcaccatgaacgctctaaagcagcccactctcagtacgatccgaagaactccttcgcgcttgcgggcgccgctcgatccgccccgcaccaacgcagagtgagacgcactgccactgtgctatacctcgtcaaaaatcgacggtatcgtcttctcatacaaggtctatcaaaacttttagtacattgcaggtaggtacccacatcgtatcacagcggggcagactttgaaaaccccgatatttggctcgcctgcgagtaattttgtttcaagcctcagtctacaattgtctctatcttggctctgagcggtagagctggtgacaagggccgaccccattggacagcggacgatacgtcgtctcggattggaactggccagcctgatgttcttcacaccaaaagcgctgtttccggctctgtgcatgcccacactcgtgtatcgatggatttgctttacgccataagccaaggtgacgtcgatcatgatgtcttcaatgtctcgtgtcccacaaaaacggcctaaggagctcagcctagtcgacctttgtactggataactctagactaggtgttccctagccttagtgtttattggtcgcccaaattgatgatcggaaactcgtcgccctttcaaagctcatgaccagaggtctggcacggtttttagcctcgacaagctctagcccagagcatttttgccatgtgttgcgtcctcaaagcgagtagctgaaatctcttgagggagaatgtgcaagctgcaacgacgtcgctagaggtacgacgaattcgagcgaggacgggttgaaacggttagaccctcagctttgcggatttgctcccgaaatgtaaagctcagtggtagagcgtcgcactcgggggtcgtgatgcgtgtcaaaattcgattcgaccggtttccagccggagaagttgtaaatttaggtagaatttcacctctatgtacccagattgaatatatctaggtgtcatacccataaacgtatagctgattgtgtaaaagtctttgtagacatgcgtgagaactgtccgcggtgcatatcgagtcttccggatgcttttctcctccccttgttcgctagcgttgttgacacagcctaaacccacgggccatcatcatcgaaatcaaggcgacagaccatcatccagtcagatcgaggacgattcataggttcacgaccgcttcaagtcgagactgcatagcaacaccatcgctagacatacaggtatcgaccacccacaagttacgataggtcgtgcccgggagacctcgctacgattaggacctagctattaaagacggtcgctcggaatataaatagcgtccgtcacccaccctcatacccacttcatcaagaactttttccccttcacctcgcactcgtcgcctccgatctcgaattctatcgagacgatatcagtatcgaccttctcgtgtcacgttagatcagctaacctgagatctgatctgcgaacggtaagtagagggattgcatcgcccagcccgctgcaggagaatgtggcgggttcaaagtaaacaaagagaattcgaatagcttacaatcaggttttcggtattccagacgacggatctcttccaaatctggtcgacgaggaactttgacagagcgagcgaagccaagagcttacggaacctgtctaatatacttgtcgaacggtcgaccagtataggaagaaagtcgatagacgacgatactacgccaccatgaccgctctcatcacgccccagcagaccaccgaccttttgcacctcctccctaccccaccttccccctcttcttcctccagatccaacgaaaaccccacggaagataccatcctcaccacccttcaatctcgatcccgttcagatctcccttacacctatctcggtcccaagacgctcatcctcgtcaacccccttcggacgctaggaaacctttccgactcgagcgccaccgactatgccaacaagtacgtcaatcccactcagactccttccgttgggaatgccgggaagagaaagggcaagggcaaggaagaggtcggagcgggtgctgctgggaacgggttggtcctcggtgtggaacagccgcatgtgtatgatttggcaggtagggtctggacgatgatgcgtaggcggagggaacaccagggagtcgtcttcaggtcagtaatggttgtctattgttctcttctgcgatcgacgatgctgatcggcgtcggtctttcgcctgatcgcagtggttatacaaactctggcaaatcgttcgcctcgaaattgttcacgcagcagctcgtacggctctctagtacaaccaggacaggcagctctgcccgggacaatcgtcttcccaaccagatccactcgctcatgaccgtgctcgatgcctttggatcctgcaagacggcgcagaacagctcggcatcgcaacacgggaggtacctcgaactgaacttttccgccagttcggacggccgtcgatccaggactgacgggagattgacgggaggcaaggtcttgacgtttggattgaacaagacgaggatgacccggttggaacgtgacgagcggactttccacgtgttctatcaattgctcgctggcgctcagccggacgaacgggaagagctcgacttgcaagatccggatgcgtacgagctactggccagctctggctgttatcggctccccggtggacccttctctgacgattcgctccagtttgacgaattgcggatcgccatggccaacctcggtttcaaggcaaagcatctcaagtcgatctttagtgtactcgtgaccttgttgctgctgggaaacatcgagttcgaggacacggcgacgtcgggtgtggtcatggacgaatcggccaaggtgacttacgagtcgagggaggttctcgaacaggtcgcttggcgtcttggtgtaccggcagaagagctcgaacaaggattgaccaacgagacccgatacattcgaaaagagctgtgctcgtcattcctcgattcgagaggtgccgccaagcagagggacacgctcgtcaaggatctttacgccatcttgttcgcgttcatcgtcgaaacggccaatcgaaagatcgcccctgtcgagcctgaagagggggaacaagagtctacagacaccatgatcgtccagcttgagcttcccggttatcagtcgaagaactcgccactgtcagaaggtcgagccagcagtcacgttcaaccgctcatcaacagtaccggagtcaactcggtcgacgagtttagcatcaattttgccaacgagatgttacactcgtacatgaccaggagatgcttcgaggaccaggtcgacggaggcttgaacacttcgatcaaatcggacggtatcgagctcccacacgtcgtcacgatggacaactctgcgtgcgtcgaaatgctcagaggaggcgtgatcgagggcaggacgcatcgcctggcatcccgtcccatgggcctgttgggcgttttcgacgaggcaggtgtcgccatcgacccggaacgaggtctccaggatgtgacccggcaggacgagcagttgctctcgatcatgacccgcacatgtggcgtacacgcatcgttcatcgccaatccgcccgctactaccggccgcaagctcatgttcggcgtcaaccattatgccggagcgtgtacttacgacatgtcccactttgtcgaaaagaacgccgatatcgtcgatgcccagatcgtcagtatgcttagggctagcagcgattcctttgtggccaaactcgtctctggcccgtcaatctcggccgaaggacatccccttgacgacaacaccgtcgtacaggcacaagtctcgatcgcgccccttcgagagccatccttgtctgccatgtctgcccccgctctggagagcagcaaggcgtacccggtcacgactcagctcaatgccaccatgactgatattctcggttcgcttgacaatactgagctctggcacgtagcatgtatccggccgaacgactcgggacacccaaactcggttgacaaacgcaaggtcaagaatcagatccggtcaatgcttttgcccgatatggtggttcgcaaacagatcgaccatgtagccagccaggatctgcttcagttctgcgactaccatggacttcgcttcgacatgaacaaccgaaacagcgtggaaaacgctgtgaggcgctttgcttcggagcacggttggcaagaacagcgcgactatgcgatcggccgatctcagctgtggctcggatacgaggcctgggtcgacgtcgataatgctgtccgagctatcgagggagaggttgacgacgaggacgaatcgccgttctcggatagcccgcgacagacgccgtatggcgcgggtagtatcgccgatcccgctgagtcgttcatggaaggtcacaaggagcagggtggttatgatgagagtcgcgagaacctactcatgagtaaggcagcccctactcgatgggattcggattacaaaaacggcatggacagcccaggggttcctactcttggcaacgactaccccgcagaaaagcacgatatcaacgaaaaaggtctcaacggtcgagacgccgaagtggctgacatgatcgtacacgaaaaggggcaccatgccgaaatggaagtggtgccaacgacacgagcgagacgatggtgggtccgaatcacgtggttaatgacctggtggatcccgtctttccttttgtccaaggtcggaaggatgaagaggcccgacatccagatggcctggagggaaaagtttgccatctgcgccatgatcggtatactgtgcgggatcatcatcttctatatcgtcgtctttggcatgctgctatgccccaatatgaacaaggcttggaacacgagtcagctcacagaacacggcgacgccacgagttattacgccgccattcacggttatgtttacgacgtatgtacccgagctatccgattttacaacggacgtgctgtactgacacgtggccctttcccggaaagtttacgaaattttacagagggcagcatagcgacgtggcagcctatcccacatcgtccgaaatcatgctgcaatacgctggtcaagacctcaccaactacttcccgatccccctcgacaaggcatgccctggcctggtcgaccaaaactttgcctttagatacgccaattttacgcccacagtcgattacgccgtgcatacgtcgggctcgcttcaaaccgccaatggcacaaaattgaatgatgaaaactggtactttgatcgtttccaaccctacatcgatcagctatacaagggtcaattcgtctttgataaaaaggacattcagcagcaggctgatgatagttccaagtcagtgtcgatggctgcgaaatatgcgtaacttgcattctgatgaccctgttgtatcaacaggatctgggccatctacaagggtggcgtttacgacctctctgactacttcaacactatcgacttgttcaaggatgcgagcggtgaaggagtaccgaaatacgactttttggatagcagcatcacttcgctcttcaagcagcagccgggccaagatctgaccaaggatatccaaaaggccctggatgcattgggtcctgaagacggggaaaggcaactgacgtgtatgaagcgtgtgttctaccttggcgacaccgacttccgaaaggaagctaggtgtacagtgcagaattggcttttgcttgcgttttcgatcgtcatgatgagcaccgttgtcgccaagtgtgagtgtctcgtgcggtcctgacacccatctcgacctgacttcatgcttctctccgcgcaacagtcttggctgccctgcagttgacaagcaagcgatcaccggaactgcaagacaagttcgttctgtgccaggtcccctgttacacagaaggcgaggaatcgctacgacggaccatcgatacgctcgctgccctcaactatgacgacaagcgaaagttgatcttcatcatctgcgacggcaacattatcggtagcggtaacgacaggcctacgcctcgtatcgttctcgatattctcggggtcgatcccaaactcgatccggagccgttgctgttcaaatcggttggcgaagggtcgagacagctcaattacggaaaggtctactctggactgtacgagtttgagggtcatgtcgtcccgtaagccttttctgaaagggcttcgagttgggaaaggcggaggctgaagttggtgccttgcttcagatacatggtcgtcgtcaaggtcggcaagccttccgagcgaagcaagcctggaaaccgaggaaagcgtgattctcaggtcttgctgctgcactatctcaaccgagttcactttgacgcccccatgaacccactcgagttggaaatctaccatcaaatgcggaatgtcatcggtatcgacccggcgttttacgagtacatcttccaagttgacgctgacaccgtgagtgatacaactcgaacactggtatatttgtgttttaacgtctaagcttgccgtcattccacagagcgtgacgcccgactcgttgaaccgcatgatcgcttgcaccgccgacgattcggctatcatcggaatctgcggagaaaccaaggtcgccaacgaaaaggaatccttcaccacgatgattcaagtctacgagtactacatttcgcaccatcttaccaaggctttcgagagcttgttcggttccgtcacctgtcttcctggttgctttagtgtctaccggatcagaaccgcggataaaggtcgtcctatcatcatttcgagcagggtcatcgacgagtacgccgagccgaacgtcgatacgctacacaagaagaacctgttctccttgggcgaagatcgatatctgacgaccttgatgatgaagcacttcccgaccttcaagatgaagtttaccgccgacgccattgcgcatacggtagcgccgtcgagttgggccgtcctcttgtcccaacgacgacgatggatcaattcgactgttcacaacctgttcgagctgatttccatcccggaaatgtgtggattctgctgtttctcgatgcgtttcgtcgtattcctcgatctgctcgggtacgtgccgggatcggtcttatatagaaacagcttgattgacggttctgccttgcgtgcctttgatcagaaccatcatcttgccagccacctttgtctacgtgagttgaatgtgccaaacttctccctcgggatcttgcattgacttttgcgctcgtatacagctcgtctacctgatcgtcgtggtatctactggcaaggctgcggttcccatcatcgccatcgccatgattgccgccgtgtacggtctacaagccgtcatctttatcctcaagcgagagttcatgctcatcggatggatgatcgtttacatcttggcgtgagtcgagcggatatgtcgagcctgtctgaccttaccttttgagctgtatgctgaacccgatcggtttttccgtttgtctgtgcagtttccccattttcagtttcgctctgcctctctactctttctggaacatggatgacgccaattggggaaacacccgtgtcgtcgtcggcgaaggcaaggagaaaaaggtcattgcggatgccgaggatcattatgacgattcgatgattcccttgaagcgattcagtggtgagtctagactggatcgcctctctggctcgtagggaccggatctgaccggtggggtaacccttgcagaatacgagcgtgatacttgggaagagaacgagacggcgcgggcgggtcttttggacaaggagatcgactcgcagagttacgcatcatacgacactcgatcccgactcggtgccgccgggatgggtcgtcaacagggtagccgcgctgcctcgacgtttgagagcggtgctggggattactaccgtgattcctcggcggtgaaccgacctggatctcaacgggacctgcggccgatgacttcgtacgcgagcatgcaatccagtcaacttcccactcaggaccctagggtggcgagtatggccggactgagtcaatggggagcgggcagtgtttatggtatgccgcccaacccgatgtttgcacaaaacccgttcatgggcgtgggtggatcgcccctaggttccgactatggcgggatggcgcactcgatgggcggttccaacatgattggcatgggtggacctccccctagtcaatacgggatgatgggcggaatgatgatgccgacgaatcaggcgccgagaaactcgatgatgaccaacctgaacgactttacgggcgcaccctcgatcatcatgccccaggggaccggtggatccggtatgggacctcatggtggaatgccctcgatggtccgaccgtactctacttattcgttggcaaacacggccaacccgttcggtgacgctcctcccgaaccggcgccgttgaatttcacgtctgatccgaccgaggacgacgtcttgaagacgctcaaggctgatctggcttgtcaagacttgacgacggtgaccaagcgcaagatacgagagttggtgatgagcaagtacccgaacgctgatctgacgggcaagaccaagtttatcaacgagagtatcgatcggttactttccggtggataaggggaggggcggggggacggaatactagagcatggacaacgttgactgcatgatgatgatgatgatgatgatttggatcgtagtgatgtcaaaacatatttctgcatgcaatgcagggtgcttatacttgtagtgacctgttgacccgagacttgtagtcgaccccctcgtggtagtgtcatctcgaaatgtaaacaaccccaacttaccgggacacagcaacaaaccaggtcagggtcgatcatccatcacatggttcatggttcatatcatcgatcgcatcaacaataatgcttaagatacacttcatacccaggacagatagcaacagataaacatcacccacgaaattcacgacgagatatgacctgctagacgagacactgcaacaacaatcgatctcggagctccgaaaagcacgcttattgcgctgcacagaccggtggcagtgatggagaacgtagcggacgagggagcaccgttagacctgtattggcaaggtatgtcaacgttcgaaatgaatcgctcgagactctcgactgattgtcgcagctcatcccacctggatagactctgccgaggcggtcgtgatcggcccgacactggacgacagcctcgatcaggccctggcgattcggtctggtcctaccagcgctttcgattcagatgaatctgccaagatcgaacaaagtctgtcgaggcgtcgacgaaggaagaacggaatgctgatcagggaacgaaggacgtctgcccgtgatgcaaatggaagggagagcgacgccgactcggaaggttcggggacttcgtattccaacagtaccgacaattcgaaacgacaacaacatcctaatcggatttcgatcgactcggacttgcattccctcaatcttcgttctcccctatcacccctggagccaccctaccattcgttacgtcacaagccttcaaactctaccacgatcggcgaaccggatacgcctctggcgagtctcgtaccccccgtcaactttgccgaacagttcaagtacatcatctgctcgagcgggttgcttgaggatcgaccgaaatcggatcagagacggacgagcttgctggcggctcggtcgaggcatactaccgaggttggacatcggagctcttttatctctacctatggctacgggacggatctcgagcgggatagcccggatcctcctttcgagccctcgtcttacccttatcaataccaggagcagcagcaacagcagcgaccccgacgacccgcacgttcttccacttcttcacgagtctccaccccggcgctctcgaacgtcccgaatgcgcagatattcacacgatacccaatctcacgcccttcaatgacctctcacacatcgtgtggtagcacgacttacctgaccgcctcgtcaaactcttcccggacgagcacacccacgatgatcctcaacccactcccgatcgtcgatttcgatgaacctgtcctcacgcagacgcctattatgatgcccagccctcgtaccttaccggacgtaccccgaccggcagagggactccgacagagacgtcggcaacgctctaacccgagtcccgaccgactcggcgtgggacccgaccgcatccctttgcacgtgcgacgtcgacctacaccttcgtcctggtcttacctcgccattcccctctttaagttcggcctccgttcgacttgtaccttggccgggtatctatggatgtgggtgggaatccagatgagcttgatctacgggatcgggtcttggatgtgggaattcggatggaaggtcctctggagcttgatcgctcggaaacgggggaataagacggggccggacgagggcggaagtttgaacggggatgactacagggatcaggtcgggagcgtaaacgagggttcgagacgggatgccacgcttacgcctctggttttgaggactgaaccgtccgagacgagtctagcagttgctcaggttcccgttgccgtgaaagtggacaacgaagcagtcgtactgacagccaagacgatgcagaccgaggaaccgagcttgcaggcttctgcgttggaggtcctgacgcgactcgtctcggataacgatgcttttgaaaaggcggcggacgaggcgtttgagaagctcgagcaggctgatctgtgagcatgatgtcgtccaggtcatctagctagagacgttgctgattatgccccgaatcgatagcgatgatggacatgatcctctcgaagaagcgcttcgttccaagctatacgccgccctggaaggcatttcctcttcgatgacttcagcgagcatggcattgatgccgctcgtctcggaacaagatctcaatggcctcaaggagttatacaaggtggacgacgtctcggacggtctgctatctccaggttgggatcgacatcggttctcgtcgtccagccgggatagtcgaggtttagacagctcggtcgaacactcgagacggaaccaaccgggagagccgatcactacccctatcgattttgatccgctcggatttcctcaaagtacccctctcaatgagactggagggatagaagaggctggattcccctttgatcgtcgcactcatcgaacgccgactcttggttatcagaagccttctaaacagctcgatcatactgccactcgaccggcgttaccatctctgcgatcgtcccagtccgtgtccagcttgcgccgcccatcgacgacattgatgcaagaccggttcacgccattaccgcctcgcagtccccggccttcgagcgtgataggccagacaacctggaacgctcggaacaagaaacgaacgcaaagcttgatcggagatttcaacggactcgggcggagtaatagcgtgatgtctgaccgggattaccagacgcggcggaaatttgcacatagcattcaccaagaggggtctggtcgggattcgccttacctggatacctcaacggccaattccacgaggccgccttcgcgtttatccagtggcaggcggtcaccgctcaccgatgtgcacttgcccaatcattacgcaaagcaacagattggcagcgatcggccgcttccacaaaccaaggaatcgcatttgaagccgcttctactacccgcccaagcccagcgggaacggtcgcctgtaatcgtcgactctgcctctatcgccacggcagatttgagttcctccttggacaccgaaaatgctacaaaatcgtccgctgcgccgactcctgatccccgcactcatcaacgcaagcgaagtagcttgcaatccatcggatttcgccggccgtcgagtgtcactcaagcgaggccaagcgattccccccgacccgtcaagcaacagccctctttctccgtcaacgaggaccagggcatgcacgatttcattcgaggtctgcccatggatcttgtagcatctctttccagagtcaatagtcgaacaagtcggcatgaggatgcccatcgatacaacggcacggcttcccaaagtcgcggattagccgtacctggccccagatcggaccggtcgctcaactataataatgaagctttatcgccaggaatgaacgtggacgacggtctgggtgaccctctcgctctgccctcactcaaggcgaaacatcgggccatacatgccgtcagacgccagactgcatgtcggctgctcgccttgcagttccacgcactgcaacaagcggggcaagaccccgtccatgtagctcgctactgggccgatgtgcatggggtactcacagatatacgagcgtcactcatcgagggtacctctgaagtcaccaaagtcgtcctttcgatcggcgcacgggcctgccagccttggttgaaccaaacaccgatgcactttgccccacagaagacggacgcgcgaatactgaaagacgaactgaacgatttatccaagctcgtcgaagtcacaagtaggcgagtcgccgatatcagacacatggttgcggctgcaggaggcgatcacacactattgctgggacaatggcgccttctgcgatccgacctaggacgaatgatcggggactgggaacgtggaagggtcctggtccatcgcatgaccgggactgacgaaaccttcagcaatactcgagctgctaccacaggtagtcctgcgtcggcttgcaacgaatatccgatgttggatcgtgaaaccaacacctcgaccgaattgtcgctgccctccattccctccatggacgagattgatccggacgtcatgcctgcacaacggagtcacgatgatgcgtccgtctatctgctcaactcgacatctccggcttttctaccgccgccaggtatcgaatccgtctttgaggatttcgtcactcgtttaccgccatccagatctttggctccggatggacgaaagctgaccagggaagaacgcatccaagcggtcaaattggcgagagaagagacgcgaaccaaacaagccgaaaagagcatgatcggtcctggagggggaatggacatgacttctggagataccaaagcacgtacaggggaggtcgtgacggaactcaaggacgtcatcgatcgtatacgaaaacatcggcaagcggaagcgatgtagcgggccgcacggccgccccagtcaagcttcattctcacatgattgacacgaaacagtatgacacgaaacagtacagtttgactggagtctgtatgatatatcaaactattcatcgtcttcgtcctcgtcccccttgttttgttcgattcttggcaaagtccacgcctgccatagatccaagatgataaacggccagataataagcgacgagaccgacagcccttttttggcgtcatgtcggcctgtgactgtcgggagaaggtagacgagatcgagcatgctgtcgaacgtcgacaggtaggtgaccaaggcgtaagcacctgcataggtgtgatggacctgattggtcccgatctgaagcatcattgcagtctgtctcgcggcccatgcaatgtgttgcaagtagcgtttcataaatttaagtgccgcgccctccgtaggatcgtccatctttggtaaggtcgggcggacgacgtaccacgaccatcgaagccccgcataactaaaaaaagataacgacacgaccgcctgcaggcatcggtgtatcggacgcagtatcaccgtcagaactctcctgtcatatactcagagaagctcgactgaccgccacgagccacaaggctgggatcttgacatccgatcttaaaaaagctcgttcccgatgagagggttcggatctcacccagccagtaggtacccagcgtttccatacgaagccgattggggcaacgagtttgagagccaagatcgtcggaatggtgtaccaaacacaaacaatcaaagtgaagaagaagctcagccagaattcgaattgttccgtccagggcgcgaggctggcaaacgacgacaccgtcgagtagagggtcccgatagcaaacatatagacgcttgttctattgataccgaccgaggtgaggcgggtgtaccagtagtggatgctcaagaggtggattggccaatccaacacaaatctggacagcttattatcagcctagatcattgccgtatcaccccgccatggaccgtcaaggctgtactaactgtatcgtcctgatggagaatcgcatccacgggcgggtatcttcggcgggattaccaaatataccgtctagcgggtttcgtacacaatttcgtctcagccgggctggctccgaatcggagcatctcacttacgagtttgttcccattgagagtggctcaagaccctctcagcatgagtcgcgttatctcggggaatgcttggctgggcaaacttgtcaagcaaatcaatccgtcctgcggataaaccggagaacatgaccgtccaattgacgtctatgtaggctggtaagtttgagaggggtcagacagggtttgagactaaatcgcatttcatgtgacctaccttgagcatccttcgcaacagcatctttctcctcgggatcagccgagagtgtcgccaggctgtcattccggttgactgggatcttcacgaaatccttcgagacgcaatgtcaagccaaacgcaaacgttggagacactttgtgagcgaccgggtccggttgatagatgacgtccagccttacgagaggaccagcaccgccattcaggtgcccaaggtagggcagatatcccagtcgcggctttattccagtcgaggtcgaggtattgtaccgaactttgactccccattctccgaccgagtcataagtcttgatgcagcgggacaaggcgggcttgacgtctgtacccatagccgctccgcacttttcacggcaacacgatacattcaatctcgagcctcggaataaagaagaagagacgccatacgcttcggcttttcagatccttgtgcaatttgttaaacaccttcctttccatcggacgggtctcgttgattgcatagaaatgagtcctggcgaaatacctgtgtcagagagatttgttcggatgaagatcttgccaacatccttaccgagtgatgaggtacgggtgattcttgtggatatggctctcttccttcttcggtcttgtttccagagagggttgaatgtcatccagcgcatcgtcgtccaagtcttcttccggttcctcgtcgctgacgaccgatgcgattttgtcatcattggcactctccaatcccgtatgactgcttgacgccgtctcgttcgcatccactagaatgaaattcagcaaagtcgtactcgcgccccagtcatcgtataagcgagacaacaatgcccgctcctgctcagatacgggctcctccagcccggcatcgactggtcgatatggaaatctgttccgtgagagatacggacacctgagcggtcgtacaatctgtccacagggcttggacatacggatgactcattttgggcaggttcaccagctcatcaggtttccattgactgtagctgacgagggtgtccataggtcctggagtcgtgggaaggaggaccatcgcactcctcaaatcccagccggtcagattttgatctcggctaataatgccccgagacaaagagttgtaccatgctgatcggtctctacgtgaacatggaagaagaggaaagacgttcacttacaacctgtccaaaggcagtctgtattggatggttgtcttgagactcctggaatgcaaggagacgtctcgcagaacgatgtccgagaacaagactttctctcgaggtaatcctgcacccttttggtcagcctgaaggaaagtcaagccacggatggcctcatcctgctcgacatcaggcagggttatgtatacgctgacggcgacgtcaaaccgagcctcgccgttgataatcggcctgaccagattgacgtccgaggtgtttttctccgtatccacagtcagcctgtaaaccgaatgcgggtcgctgacgctcttccaggcttgccaaaagccgtatcccatcatgacgagtaggatgcagacgaatgctgccccgatgacaccgacagtgtagacgaggcatttgcccgcggagaggctcttgcgttgtcgccggggacgtggggcatgtaggggctggacgtcttccatgctgatactatcgatttgatggaccggtttggaacgtaccacaatgtcccagatgcagagatggtagactattatgtatactaggtcgtacgttgaagcaatcctcggcagttctcggagaataaagttgccgaacctgatcgccgaaggagggagacgatggcgtagaagcggcggcagcggaaccgatagaagaaggggatcgcgtgggatcggtgaattcacccatggacatcaactgcctatcgatcaccaccactcgatttgaccatgacctgttatatacgccttagatagagactcacgggctgaaatctgaacacagttgaaccttttactctgaaccatcttgatgagtacgaagttcggattggcggatcatttcgacgtatgaagcatccgcggcgactctaagcgcatccgtcaaggcgactgagtgggtcaaaaagtgtgtttcggacaccggggagatgccaatggtggtgatcaagaccgtagacatgcgcatgctgacgcaacgtgctctcagaccagacgagggagcccgatgcgcctggattcgtccggtttgacgctgcgaatgaggacgtcctctcttacctccactgaaagccaaacgactccttcagcgcaaagcgacccaattcatcaaggcaagtctgatccacttattggatatgtaagaaaatgatctgagactcgacatatcgaaggtagcacgtcccaatgaatgctgtggcgggatggtagtactaagctgtaccggaccgattcgatggaggtctgattgacagtcgcgccccacatcgatcgatcaggtgcacagatttgatagcgtggaccgatagttgtaacggcgtaaccgcaccaatttttgagccgcgacgattctactcaatggaagcagtccttttttagtgcggttgctgccgaaaaaggagatatgacatgacctgcggcgttcaaattgcacaaggtccggtacgttttcaagagaatctccatcttgcttatctttatggtaggcaatagcacacctggatctggacctcgctcacagtcatgcgtctggcaagttccattttgctctcgcccgctttcctcagaatgattgatatctggagcaggactgtacactccatgcaacatgttcagacgagcattcctgaacggcaaagggcatacatggcgttccaaccggtcgcgatgcccactgactcccgtgtcagctttcttctggccagtgggggcttgcagatcagccgtcgactgagattctttccagccgaaagtacaaatgatccttgcaacgatccggagctgtgcagttgtacctagccttgcatgagacaggcattgtgcgcccgagtttccggcaggacggagagaacggcttccgtctctgccgtgcaatgtttccgaacgactgtcgatcgctgcctatgccaaagcgtccaccgatacactggatggccataatctgatctacccacgaggcctataagcgctgacagcacagggccgtcgagttgtacatgtacgctcgaccgaccgatggcagggaacacggtctgtcggccctttgcagaggcatcgacctctgacatggcaccgaggtcgaaagaccgcggtcattgtgactgtgcactggatttgactgatgattaccatgacaggcacgcccgacccgatggtttcctcgcgttcatcggagtacgtatcgtgaggtctaagcccgctgagaatgatcaccggattggggagtcatcgacctcggcttcgcagaggatcgttcaatctggcttgctttactatggcgatactgagcgcaggttcgctgctcttggtccgttggtccccgctgccgcaagagccaccaggtgtttcccagctttatcgggcgtgacgggaccccacacggcattctcaaaatctcggtccgcttgcagataaccatgacggccgtcggacgtcaattgtcgaaacggtattggtatgacatgaagaaaagtctggtgtgcattggtgtatcggtatactgcgcacgggaaagaacgggcgtcggatgtgatcaggatcaggcgagtgaggcgaaatgctccccatcccgatcaaggacataccaaggtcttgtcaaacgtcgcccatgaggactgtctataatttcggctattccaagcgaagattaggttgatgcagcgaagcggcacgacaggatgactgtcaggacacttactttcgtcgaggtgagatctcgtccgtttgctacaggccatcttttacttgatcctgggttccagtacggtggcaccaacgtgcaaatcatcctaccgagtctagcacaccggccgtgtgtcagcctttcgaggcgacgaaacaactcgtccgctgatgccactgacgtactggtccccgccttgtttcatccttctcttctcattccccctgctgatcagatgaccaacctccccaaccccaatcccaagaacgttaccccgagcaagacttgcatcctcccggcgacgatggaacctccttttcgcctgaccttgtcgaacgctccgtcctggtaggccatgtacaaggcgtaggtgccgactcctccaaaggtggcggctcctgtcaaccggcagggaagacagtctttggcggtgatggccgtcgtctcgggcgtctttttggtggtggtggtcgctgtgtccatgctcatattgccaagctgacagtgaatggacagacgtagagatgtaaagtagagctaaggattctgtagtcgtaattgttggtggcatggtcgaattacactttggcatgaatcttgaaattgggtcgaccgccgcgtgttaggccgaggaggttcgcccaggtgctcatctcatcatattcgcatattcatatacagtgccatatcgattcacattcgttgttgggcagacagggactcgattgattgtagtgcggtggccactcagtgggttggagagatcttcaaatgaacgggatgctcaaggccctcatggttaccaatcatcctaacctttctgtgaatcacccgagtcaagttttgaacgatcatgagaccttgatgactagtgccgctactagccgctttataggttttctatgcaaggacggtgggcgtacccctgtcaaccggggaaggcggtgggtgcactgataagcatcttcagcaccctaaaggattctccctccatggtgagaacatcactcgacctgattaggctttaccctgcagtggggtggacaatcatcgtattcaccggaatcgaccccgggtcgagaatcgagcatacatctacatgaacacgggcatcgagaatcgacactccaacatacgcatcatcattgcgaaccgggctttttatcgcttgcccctgccccttccaccaccaccgccacccctcgcgcgcacgggctagcctgatggccgaggtggatagatggccggagcaggtttactatcaaacaaatatatcattgctcgattacaatttcaagtatgacgtatcattcagtctcaccttgctttcgatcaactcgcaacgccgaactgaccttgtttgatcagttgatcgggttttcggaccggagatgtccgcgtgaagcgattagcgcgagcatcgtctcggtacaagatgatcaaagggtaatggaacacctcgatagctggcaagctgggacatgttgaacgagtcgagatccaattctaccccagattccactgacggacgttccattcgattgggtgtcccacgaatccactgccatcttatcgacgagaatgaccgaaccgactgccgccacagaccccgtgatcacacgcaacccggcctcgcttccgagctgttcggacgacctgataaaaaagattgaatactttaccgtcgaaccgagatgggtgttcgtcagggtggaaagcacgggcggaaatgtaggatggggggaagccacactcgaggggcaagtccacgatcgtcagccgtcatctacctagcctgtacgtaggtctctaacctggcacacacatcctcaacagccattccgaaccggtcgagggcgctctagcctcactcgctcgtctcttcgtcggctggcccacggataacattgccgatatctgggaacacgcttaccgaagcaggttttaccggggaggcgaggtcatcatgagcgccatctccgggctggatatcgcgctgtgggatctcaaggtcagcgggtcaaactccccatcttgtggacagcctcgaaagtcgtgctgattcgatgccgatcttgcagggcaaaagattaggagttcccgtctggtctctcctgggcggtctcgttagagagaaagttaaggtttacgtcagtcctcccgtcatgtccgcccgtctgttcgcctccagtatacgctgaacccaaaaagtcgtcacgcttacagtgctggatcggcggagaacgcccgggcgatatcctggccgaagcacagcataggaaggataacgggttccgagctgtcaaggtgaggctctacagcaagtcccacagggaattctgatcgatactgacaagcggggtggcctcgttagatgaatgcgaccgaggatctgcactggttggacagcccgttggccctggatggcgcagtcgagaggctcaagacggctcagagtgtcggattggacgtgggcatggatttccatggacgaggtacgtcgtccaactaatcgaacgcgtctcgacgccggccgaccagatctgattcatgcaatcgatgatccacaaagtccaccgacccatggccaaacagctcgtcgccctgctcgcaccccttcgaccgctctttctggaagaacctctcctcgcatcacacgtctctgaactcgcctcgctcgccaaaatgtcctcggctccgatcgccctcggcgaacgactatacacgcgcaacgatttccgaccttactttgagcaaggcgctgtggacgtcatccagcccgatgtagctcacgcaggtgggatcagcgagacaatgaggatcgcccggatgggcgagacgtacgacgtcgcgttttgtcctcattgtccaaatgggtcagtatcgagcgagcacttctgaccctgttcttgggctaaccgtagatctaatgcccaaatatcgcagtcctatctccctctttgcgagcatcgccatggatgccgctctacccaactttggaatccaagagatgtcctgggcgatccattataacaagggagccgatctcgggacttacctcaaaaacccagaggtcctagaagtcaaggacgggttcatccaggtgcccatgacccccggactcgggatcgaggtcaacgaggagttggttagggaaaacgcaaaaaacgccaaacactggtcgaacttggtttggcgaggagacgacggggcgcttcgcgaatggtaaatggaagatatcgcgtgacagccaatgtagcacgtatatcagtgaaacaatgaccatatgaatgcattccgggggatacaaatgcgtggttgtgtgtcgagaatctcgctcgaaggctattacaatgtctattgattaccaaagtcgtgagggagatcgatcaacttgatctccgcaagggggtcgtgaaaggtgttcgtgagagatgcgcatcgctgatggcaaaagctagcagaattatgccggcgttggacgatttgtgcagatcagtgcgagatgtacctagagatggttgaccaaacagatagccgtaagtctcgtgatgtatgccgggattgagattcaagacctactgaaagacgaaggatacgtcgcccaacccgagttcagctcgtagcacatcatcgtgcaatttcccaagctcagcgttcgggtaatggttccaactgtgcattcaggtgtcagccagagcatccgacaaacccccaattatgctgactcacctgctagtatcaccatacaacaaggccggagccttgacgagctgtttgccatctcgacatcgcttgcacttgaatgtgtcgtgggtatcgcaaactgtggtctcgttgaacttgaagagttgtcgcaaattgtcgaccgagaagtggcgctctgtgtcttccgcagcatccaccacacatgcggacaagtcttgcttcgaacatctaattgtgggcttttactcagcctggttcaacgagctaaacgtacgcactccactcactgtctttggaagatcttctcttcgatcgtccccgtagcttggaaccgatagacgaaacattccttcttttgcccatcacgccatacacgagccaaagcttgctgatcgcttgcactgtatgccgagttgtaagtaatcgaagattacacgaactcccgtccttgcggcgcgactcacgggttccaagcgggatcaaacaagatcagacggttggcaccgatcaagttgataccacatcctccagctttactactgagcaagaacacaaactccttgccctcggggtcgttgaaccgatcgacgagcttttgacgcttgttgacgttcatcgttccgtcgagacggaggcatccgtatctgttgaaagagaccggttggattcagctcgctttctctcacaggcaatgactgcgaatcgcactttttgtttcggcaaagcctttccatcagatccaacgtttgggtgtagttgctaatgagaacgatcttgtcgttcgttcgcttgttgatatgatccaagaacctagatgtcagacgaatcagcctttgccgtcgcaggtgccaccaagtgaaacgcacctctcgaggaccatgaatttgccagaatacgagcagtcaacgtatcgcgccgaaccaccagcacccttcatttgatagtcatccggcaagaccttttcgcaccctggtaggtcatccggcaagttgagcagatcaggatgattgcacagcttttgaagaatgttgatggctttgagcggttgagagccggttcctcgaagcagcttctggatctcgggcgaggttatgaagagtcggtagagtgcgagttgtacagggctaagtccgcagaacacgacgtgttcatatttgacgggcactgaacggcagcaaaagtcagctcgtcgaagtggtgattcgcaacgcttgcctcaactcacgatacttcgacaagaggtcattggtacgcctgatgatgaacttgctaacgagccctccgagctccttcagcttggcgtcactctcgaccctctccttctcgctggcatccgcatctcgacccctaaggattttgagctcaaaattcttcctaaagtccaacctcgtgcccaggtattccgggttggcaaagttgaggagggcaaaatattcggaaagatcgttctggatgggagttccggaaaggatcaccctacgtttgcagttgagcgtggtgagagcctggaacgtctgcgagtcggcgttcttcagacgatgaccctcgtcacacagcaacaggccgaccggacagttggccagctcgtcctgcaaagatcgaagcgtctcgtacgatactaccatcactggagacgaagttaccgaactatcagcataatcccaaacagattgcctgcacttcacggtagctcaccaggcaatgtgacacctcgacctttggcagcgacccatcgtctgacggcaggaatcaaatcggcccttcccccctttccatcgactaacaacgggttgacagcacccggtccgagccatttcacttttgtcaatgagcgcctcgtcagttcgggtgtgcgaaacaacgacaaccgttctcatgcggcttgaacttacccagctcgtttccccagtttcgcacaagactgctcggacacacgacgattgccttgtcgatggtgcctttccccgatacgggcgactgcttgagcaacgtccacatgagagcgatacactgaagagtctttcctgtaggacaggatagcgttacggagcgggtgagactagggctaacatcgctgatctagcggtcttgcttacctagacccatctcgtctgccatgatacaaccaaatgcgtcttttgccatcaatccggtcgtgcatcggtataggaactgcgtcaaagcggtatctgaatcagcacctcgaaccagcgtcaaaccaggcctacaatcaagctcaccttgacaccctcgacctgatgaggcctcaattttgccgtcaatctcggatcgatcacaacgggcaccttgacgtcttcctttttcacgaccttgtccagccccaaaatgaccttcaagctcttgtgcggaccattcttctcacgatcttccttttgacgacggatcttttcctcttcttcccgcttgaccagctcttccgggctgaggttggcctcgatcgaggttgggtcgggctcgggcttgtcgtcaatcgtcgggtcgtacaagacgatggcgtggtcggacatggggtcaaagagaggtctaggcaggaggatgggttgaatgcggcatccgagtgcggcgtgtgagagggaatgtcgaacgggcgagtcggcgttcttggcagtgattgaggggatagagaacctatacaaagcaaggatgcgcatatgtcagactctgtgatggtcgtagtgcagctgtaagacggctcaccctctgctaaacaccagctccttggccttgacggcaaagacgggaaactctcgattgcacatcttacccatatcacctaacaccccgtccgggccgtactccttgttccccatggagtaactgctattgacctttttcttcctcctcggatcgccatccgaatcgctcccatcattgtccttgtcgttctccttgtcatccgcttgtccgtcttccttgtacgagacccgttttcgtttgcgctgaccgaccgacgtcctcgtcggggtaggggtactgaaggaaggggtgcggaacggcttgaaggtcggggtaccgaaaccggccccactggcggtcataggcgacgggtcgcccttcttgccgctattcgagggaagacgcctaagcatgacgggcaatcaagaggagggtaggtttcggggaatcgctagggacaagagagtgacgtcgtgccgctctgatgtcgatagagcctttgagcttagaggcgggtacccgtcgagatggtcgcgctgatcagctctcctacgatttcgtagctaggtggtagtaggtagtgtcgaggaaggtgtggcgacactctgcaatctccgttgacctccatcattgcctctaggtcgcgtcgcgagtcgattcgatcgaaattaaaccggtcaaaggcgatgtgacatggacccaatgggcaggacaggcgagatcaattacgtcactgatttacttccgatcacctcagtcttgcctctcgtctctgcaccttcgctgtgtttatcttgtcgggagtaaattccaatcaatcgatctcatcagctgggctcatcctaatcagcttcgcttttggtggtttgatgctcttgagccgcgaggttgatcgtccgggaaggtcagcttcgtcactatatctataaaagattagacagaagatatcatcgttattgcatcatccctttcgcctttcgcctcctatagtttggcatgcgatgaccgtctactcgcagtgtctcccatttctctgccgacctacctaggctatcgacatcatatctccgtggtgagcttacacacgactcggcattccgcttaatctgaacggtcaacctgatcccgaccgtcaacggcaaaagtttgcatcctctcatcgagagcccggactgcatccagttctccggttgttgtctacacacaggctcatattacagcagcagcctgagtcggtaagctcataagaacgataccgcatcttcggcgattttgagccaggaagctgattgtcgatgtaacacgtgtatgccctgctcagtccacaagtatacaaaagcatcatctaggtcttcgccgtttcaaagactgcctgtcctatgcaaggttcgaaacgtcgacagtgaatgtccgataggcaccggtacgtagatgagaataccgaacagagtgccttccacgaactgacatgatcgttttcttcgcttgtgtagttctattgtctgaaactcggaagactgcccggaaaccgactcttatcttccttcatacaattgaattgacctgaactttaccgccatgcctcgtctcggtacaccaaagaagcgtacctctcgtgccaaaaaggtcaaacaggcagtcactggcaaatccatcaagtctacggaatcttcgaaatctgccaagtctactcaacccgataaaactgaggagcagggggacggcatcccgaccgataggctggaagtgatgctcccgtccgagcaggaagtcgatctcgcagccggacccgagcctgaacctgaagccccgcctacccaaaccgttgacctgcatgacaagctcgtcgttctcgatctagtgcgaggatgggagatcagccaggctctcactcaaaaggatatgtcgatgcgaaacatataccgtcaccatcattactactacaacgattattatacttccaagaccgctcaagaaatgctggatgatgccaaaccgatgagcctcggcgatgcgaccaccttgtggcagtcgttgctcagaagctcgagtctgggttgggacggtcgacgagggatcaagaaggactacaaacgatggactttcaagcactttgtccgacgcaccagtggtccggcggttttgacggtagatgcgagggggagcgaaccttcacagaggatcatgtcggtgcgtacggagatgttccagaatgcataactcgaacctagtgattcgatcgtatacggttcaaatcgcttccaggtccaaaggagacttgaaaagttacaagcttcggccaatcaccagtggtacatccgctctcacggccgtatcgccgagtgctacttcatccacaacgagcaggccaatcaaaccgacattaccgccgaaatgtactggggagatgcgagtctcgatactgaacaacagcgactccgacaagtgtacggaccgagagtcatcgacatgtccagtgagaacggaaaagctctactcgactttatctttggggacgtcactatcagcagggttcgctcctcgcttgattcctcggggccgaggcactggtccatgtactgcaagtcgatcatcgagtacccgtcgtttgaggtcgtcttgcaggaaaagagattgtccaaggtgagtcgcatgtcacgaaacaaggcagcagatcggccgagtctcacgaagtcatgttatgcatcgcagtacttggtgaacaaacaagctcgagagaaagcgtatgaagaagagctcagagcaatggaagaagaacttgttgacaaggccgacaatccctcggtccccattgatactggcggcctcgtcagcgaggaacctgccgaaggggtcaaagccggctccgaacaagcctacactccctgtgaggaggtcggtaccgctcaagagaatcgatctgcgactcttgagagcagcgagcttagctttgaagacgatgatgacgatgatgatgcagcttgaggcgtcacccgacgtcagttcctcgaaaagagcagggggaactgaagtcccgtttgccaggcatgtcgcacggcttgctctcggccaacatgttacgaccgaaacgaagagcactcgaacgagtgaaccattatgaacgtcccggactgtatctgtaaccgacaatgatcatgtgctatgtcccagttccgccgccagtgtttgttgtaatagctagaatcgcgctgtcctttacaggcgctcaaccggtagctcaatctatatgcccccttgtggttccggttctcgggggaccccacgcgagcgaggtcggcgaaaccgggggaacgaacgataaatgaagtcgaggtgaatggacgcgtgagaaaccgtcatcctgcctcacgcgccctctcgctctggctctggctctggctctggctctggctctggtacgagcctagcgagtctctctcctctcgttacagggggagagttcggcgagagatcaagctgcgcactgccttcgtctacctctctcgtgatcccaccttggaccttgactacttgttcgaatcacagtcgtacatcgttcgccaactcgatatagcaggatatccttctgaaccgctgcgttcatctgtcgtcaagattcagatcgtccgtgcccctccagcgtctagcgatcaaacgataacaaaggtgagcttctcgcttctcgtatcaacaaacccgggatcaagcagaattgtacgatacccatcgccgtaccgacaaacatatcgacaccaacgaggaaactttgttgaagaaatgttaggggtgtaagctggatgaggaacaccattgggtcgcacccgacgcgaaggaaagatgtgatccggaaccatcacaatgccgagcccatcatgcggaggcgagagttgtccaatccagatcacaagttcgccaaaaaggatgaatgaccgggacaatcacagagagttatttacgttaccagctatccaaaaacctgccggctgtcatcgcgatgacaacaatggatgaagactcgatctgggagggatatgtttcacatttcatcaacagacggctgattctgcttccttgtgcatacccatccgacctcgatgcgttatctgtttctcaatcggtccaccttgggttgatcactatcatcccggtatcctccacggtgcttgacgctttctgggaatcaacagccatctccgcctcgttgtcaaggtcctttcgtttaagaaatgcagaccatcaaatgtgtggtcgtcggtgacggagctgtcggaaagtaagctgcggacgatttctgtgacaaatctcggaggggatacagacatcccagaagtactgatcaggcacttcatgcgtttgcgtttacaggacgtgtctgctgatatcttacacgaccaacaagttcccttcggaatacgtccctaccgtgtttgacaactgtcagttgcgccaattgcgaatccatcggcgagctcgctagagctgattgaatctgttcgtcgtagatgctgtcactgtcatgattggtgacgacccgtacactttgggattgttcgataccgctggtgagctctttccccagagattcgcagtatcagtgaaatccgatgctcaatagcctctccttttgctctttccaggtcaggaggattacgatcgattgcgaccgctctcgtacccccagaccgacgtcttcctcgtctgcttctcggtaacctcgcccgcctcgtttgagaacgtcaaggaaaagtggttccctgaggttcaccaccactgcccaggcgttccttgcctgatcgtgggaacccaggtcgatttgagggacgaccaggccgtcatcgagaagttgtcgcgacagaagcagaggccgattacgacggaacagggagagcggttggcaaaggaactcggcgccgtcaagtttgtagaatgctcggcattgacacagagaggactcaagaacgtcttcgacgaggtcagttggctcaactgtaagggctgtaccttggtagctcaatctgacccatttattttcaggctatcgtcgccgcgctcgaacctcctgtggtcaagaagaagaacaagtgtgtcatactatgagcggcgatacctcgcgtcgagacgcttgacagggcgtctgaggatcggcgtatcctctacttcttgagccggatagtctccatcaccacataccatctttttcttccggccctatcttcggcccaggtcaatgcctccacacaattcctggatcatccgccgacatctcgctccccttttccctctccacccttctctttctcccaaacggcttgacagtatacacttcacattttctcgatagccttgtgtgttccgatatatacttctgcctgtgtacattattatggagagcccatttatgcagtagtgatttcgataacatgagatagatttcggcaatggagggtggcgcgatgcttccgaagcacggaggcttcccggcgagcgtccacttgaagagaatgctatgctatctgtctatcagttacctgagttttcattacaagatgataagagtgtaaacctgcatgttaccagatagcatacacttacgggtcagatctcacccgatcgctctgaaggaagcctcgaacaaggcaagcctggagctctagcaaagatcttcatcacgaccaagctcgtagcacaatgtcattcagtcgcctgcagcttgcagcggctttgatcggtgaatgagcacagtttggatatgtgcttcgcttcacatgactaaccgacctgatctttgtgcgtgcagaatacgacaatgacgaaaagaacccttacgaacgaaaagacgcaaagcaatcggccatcttcaatacccgacgagaaacgcggccgaacaatgcgtatgttaccaccagcctggtcgggggcatgacgcacgatgactatcgtcctccctcccacggaggtagtggtcatgcgactcttggtcgtcaaagtatgatgagtctaggatccaactatgatcgcgcagagctggcagacaacaggagggatactaggatgacggtcggatcgaatttcggcaatgatgacgacatggtggaagatcttgatcaagaggaacctcacggagaggttgatctggcatcttggggtattcctgaatctttcttggacaagcggccttcgaacaagagagactcaagatcggtcggaagactcgccagtcctcgttcaccgcaccgcacgcagtccgtcagagccttgtcgatgatcgggacggaaccgctgaagggtgaagcagacgatttgagaccgctatcgccttctgtggcagatgctatctcatcgatggcaaccgtgccacctcatgtcgacgattcggaacgggcagcggtaccacggccaccagctttcaagggcgacagagcgtcaaagcgcaatcgaacagtttcgttccacgagttttctgttcctcaggatggacagaacgatgctgcggaggaaccggaggaggtcatccgccccggatccagtatgagtgtcctatcgaggggcaaatacgactatgcagcgttcccgccgaccagtcctcagcggggatctggaaggatgtctagtgcctcttccagctaccccaccaatatccctttgcctgcatctccgtcatccgcgatgggcagaccggattccctttatctcgacagtcccggagaggagggtatgaatcccttttcactccctgcaccagctggaaatcgggtatcgagattcgatcctaagatagatgctcatcaacggacttcgagccggggatccgctctgcccgatcggccaagcagtcgtgcaactggttatttcggagcagaatcaggcccgtacgatgctcagtcgaagcacggtcagttggaaagcccctcgtcgcctcgaggtcctcagatgcaacccaaaattcagttattacgcccgaaaacgcttctcatgccgactcccctgcagggacaactggatcccaatgactctgctcctctcggtagcatcgacaagcgtggttttttagtcggggaacggccccttcctcccggagcggttcgacccaactcattgttgggatcgctgccgacttcgaagagcgggaacgtcaggtcagctacgcaacgaatgtttgcagattcgctcgcagtcggcggcagccggggagaatattttgtcggcggcgcggatgcggatggcgaagtggcttttcatcagcttggcgggcaaactgcaccagagaccgaagaacacatggctagggaggcagctcaaaccggcacagaagactggcgccccgttcgtcctgtgacaggcctcagcctcatggataagttggaggagagaaaggcggcgcagatggctaagcgcaggtcagttcctgggccctttcggaaagtccttctttcaactaacaaatagccggtcccgatggcagggtcttcaccggggactctcgaccaacaatgatgtcgcgagacagtgacagtcgtcgaactcttatagatctggcggctcccgatattcaactttcgccgcagagcatggcagacagacgtaggactttggcgagcgaggccgagggtggaatcgctccgctcagccggcctggcaacgaccgtcatcgatctgtctttggcgtggacacagtctggcagcgagagatggcgaagctgcggaaagaagaagacgccgagcgtgctgcggataagcaagtcaatagtaaacgtgcggctggtctgccaaccgctgaagacttcgagcttgatggagcacttcctcagacttacgaagacgaccaggacgaggatctgcaccatatgccattgttggatgggtcttccgtggtcgcgacaccccttccggttctaccgcccattcccagtgccaacgatatgtcttctcgtcgtgcccaaccggttgacatagacgattggggcgcgtctgatgacgagaatccgaaaccggcacgaagaacgaagaggaaccgcgcggccaaccgactgcctcatcaagcacaagctagtcgcaatgactcgagcgatgaagatctcccgctcacaaaggctttcaagataaacaagcgacctgtcgcgagcaaacttgacgagtcttcctcggaagatgagcccctggccaagatactggtatgtctgctgctcatcgcatgtttaccgcttcaatcattgacagatatcgatttgcaggcaaagaagcaaccgcccgtacttcctacgataccggtggtttccgctccctccaggagtgacggtgaagaagaagatgacgatatgcccctggcactccgtcgaatgaccatgatgaatttgcagttcggatccggtgacaaaccggatgaggacgatgacgatatccctctggcgcagaagcacctctctgcagcccatgctcaagcccaacgacaaagcgcaatgttcccccatcagcagcagcaacatcaacaacaattgctctaccagcaacaagccatgttcgccaatccaatggcgggagggttcggtatgcctccaatggcgatgccaatgatgggaatgcctatgatgagcccgtacatgggtatgaatccgtcaatgatgtcgatacctcagatgcaaccaccgcaggaccctgcgatcgaccgatggagacgcgaaatcgaactcaaggaagggagcgtgatcggcagcgtccagagcggaaggacgtagagcgacatgaagcagtgtctctatctttgatggacttgggaacctattagcctaccgataccaatgccctatatattttatcctatgccagcgattgttggtttgcatgtattagcattatccaattatgtcaacacaaacgtccgtacccatcgagacttgcctgacttgcaactctggctggtcggactcgcgcggggaaagtggagggacaggcccggcgcatgggcgagtcaaaagttgaggagctcaatacatcttcgatcgatcagtcacgctgccactgttctgtaagctcgacctagacgaacgattggaatatagaaagtccacgaagctcaactcgataccgagacttcattgtccactgccagccttaaacgtcttcagcaagttctcagtcacctggtctgacacaacgatgattgaagtgagactcgcatttcgacctgttctgcactgccagagctacgcgagctgatggattgaatttgttacgaaagacgacaccttcggtcgacgaggttcgacagttgatagccgagaagaatgtcaactgcgtcccgatctgtgcgcagatcccagcggatctgctcacgccggtaatggcattcctcaaaatcaccgagaaatcggaatatagctttttactggaaagcatcatggatggagagcacgtagctcgctatagctttatcggatcaggtgagtacaacgatttcactcacctcgataacgagatgatctcacaaacgctcaatctgacagatcctttcaaggtgatcaagaccggcgagggctacgacattcaaggagatcctatgaagcccttggaggccgagctagctcagtaccgatatcactccattccggaggtccccacatttactggcgagtcaagttgagcaaggaaagttgatgcagacaagctgatgacagcacgcttgctgcaaattcaggtggtgcgatcggattcgtcacctatgactgcgtccagcacttcgagccgaaaacaaagcgagagctgcgaactccctttgagatccctgaagccgtcttcatgttctgtgactctatcctcgtcttcgaccatatctaccagacggtcaagatcgtgtcacatgtctaccttccggacgagtcggatccttcgtcgatctcgaccatttacgaccaggcggtcgccaaggtacaaaagctttcgcaacagctagcaagtcccaacaccccgcttccaccccagccgccgattaagcgaggcaacgagtccgtttcaaacgtcggcaaggccggttatgaaggcttcgtgacaaagctcaaagagcatatcgtgaagggagatatcatccaggcagtgccgtcccagagactcagccgacctacctcgcttcaccccttcaacgcataccgacatcttcgacaggtcaaccccagcccttatatgttctatctgaattgtggggatgtacaactggtcggagcgagcccggagaccttgtgcaaggtggagaaccgcaaggtctacaaccatgccattgctggtaccgtcaagcgaggaaagacgccagcaggttagtctcattgcggcgaggattcgatcgcaaccgaaagctgatgcgttacaagtcttgtttggttattgtagatgacattcggttaggcaaagagcttctagcgagcgagaaagatcgagcagaacacatcatgttggtagatcttgctcgaaacgacgtcaaccgggtgtgcaaacccgagaccgtccaggtggacgatctgatgaggctggaaaagttctcccacgtcattcacttgacgagtcagatcagtggtatcttgcgagaggacaagagccggtaagcggccgcttcggatgtcaaggtcaaacgcaagctgatgacgaccgtctctacgcaaaccagtttcgacgctttcaggtccattttccctgccggaaccgtgtcaggtgcacccaagatcaaggcgattgagattgtcggtggactggagcaggagaagcgaggggtctacgccggtgccgttggtcgtttcgacttcaactcgaacgaactcgatacatgcattgctatccgaacgatgacgttcaaggatggaaccgcgtatttgcagtcaggtacgaccgtttcctcagttcgttctcgatcgcaaagactgatgagttccgacttggcaggtggtggcattgttttcgacagcgtagaggaagatgagtacatggagaccatcaacaagctcggggccaatgtccgatgcatcgatgccgctgaaggtaggtcgatctggcagtctcgattcgatcggacggctgatttgtcgctttgtggggattgttacagagtactactataatctgcagcagcaacaataatcgcgaccctcgcttgaggagcaacgtatagccgagccgccagtatgccattatcaacggtcatctatcatatcatgtgcattgataatcgaccggcgcagatcggagatggccacgtgaccctcgagcagagccccgcaagtcgcgaagttgagcggctccccatgctattctgtgactccagccgccgcaaaatgacgcgggccgtcctcagtattctttgcccagggagaaaccctccccgttccctgccaccgaccgccgcgcagcctccttgcgctatttgactccgaagcgagctgatcaatttcgtccgggcgtgggggcacgggaccgctcgatatctctcggttgaaatgatcaacgctctgacggcaggggccagccagagcggtgcctgcttctcatgctcatctgatagcggaggtacgagagttcatagaagccccaaagacggataacagatatcgattcgagactcgttcaggctgcagggatatataagtgttaagcgagtcgcgatgcactgccagcagacgctgtgcttgccttgacacatctgggtcgacagtatcgatcattaattcatcgctagactatcatcttattagtcaccactcgataagcggatcgttatgggtctagccaaagagaagattgcagaagagggagtctcggcccgggtggtgagcccgacgggccatggtgttgaggcggattctcgtctcaaagagatggtacgtatctctgccgatgaatcgtccggatcgtcataccgcctgctgaaacaggcacggggtgttacaggggtacaagcaggaactcactaggtcgctcggaatgttatctgtgctcggtctagccttcgcaatcatggtacgcaatcagcttccgcagggacgactttgtcgtgcgacctgctcatggattcggagcaaacgcttacttccccttttcgatgaatcgttctctcctctaggcgccgctgctcggactcaacacagctcttaacatcgctttgacaaatggtggacccgtcacaatcatttggggtgtaagccacgagatttcgaacaaacgatgggagtcgcgagcttaccacatcctccttaattagtgggtccttgtctcactcatttcgatcgcaatcgcttcctccctagcggagatctgcagcgtattccccacatctgggggtgtatactgtcagtcgactctgtctcgttagaccttgacccgtctgatgagcgatcttttgagacagactggtccgccatgttatcgacccctaaatacagtgctttggcgtcatatgttaacggatggctttcgctggccggaaactatacgtgagtctaaaagacagagctgagcgacatacgagaggctgacagttgtgactctgcaaaatcgacagtgtcaccgcgtcaatcactttctccggggctcaactcattctggcggccatcacgctgtggaacgatacttatgtcccgaccgcctggcaaaccgtgctatgctactgggcttgcttgatcatgtccctatcggtcaatattctcttcaacgcgtaagtcgcttcatgacgcaggctattggcttttcgctattcgcttacattgggattcctactcaagccatctcgacaaattgaacaaggtctgcttgtggtggaccggtgcatcggtcatcattgtgggtggcaacaagtccaatttcccacagcacgcttcactcacggaccagagtttccacatagatcatcgtcaccttgttagtcaaagcccccaggaggaactcggcagcatacgcattcggagaggtgagggtcaattcggtttgcgggtattggtgcgatgagctgactgtctttcattcagttcgactcgtcccccagcggctgggctcccggatggagtttctgcgttggcttgctacaagcggcatatacccttacagggtaagtacaacgattagcccagatgacacaaagaattgacgcttatctgactcgcttgaatagttacggtaagcggcttcatcgaattttctcaaccgagaacggtgatgttgacttcccttcaaaacaggtatggttgcggctttgtgtgaagaggttcacgatccgcaacgagaggttccgaaggcgatgggtaggtcggacctcgatctgaatttgaccaagcttattggtctctgacgctacatccttgtctcacccagtcttgagcgtcgtggcggcgttcatcaccggtgtcgtctacttgattcctctcaactttgttttgacgaacatcagcgacttgctggcggtaccatccctccaacccatgccgctcctattcaagctggtagttggaagcgctggcggggcatttggtctgctgtttttaggtaagtcgttttgcctctactgctgtcagggatggctagctgaggtctatctgtcgaatagtcctaggaatctgggctttcgcagctgtaggatctcttaccgcagcatctcgatgcacctggtctttctcccgagacggcggaattcccgcttctagcgcatggagaaaggtcaacaagcgattcggcctgcctctgaacgccttgatcctgtcggccgttatcgacgctctgctcggattgatctacctaggttcttcggctgctttcaacgcatttaccggtggtgagtatcgatgaggattgtctcgatgaccacgatcgtagactgacgaatgctttcttgcgcagtggccacgatctgtctaggagcttcatacatgtttccgatcatgtgcagcgtactgagaaggagagagctggtgaaggacgcgccattctcgcttggtaaattcggttatgccattgtaagttcagctgtggttattttgacgaattgacctcgctgaccctcttaacgcggcagaacatcttcacgatctgctgggtgtccttttcgattgtgctcttttgcatgccgaccgcaatcccagtcacaccatcttccatgaattacgcaagcgtggtgttcatgggcttcagtgccatcgctctcctctggtatctcgttagcgctcggaaacactacaccggacctgctatatccagcgtgaagacgacggacggtgtgatacaggtcaccgagcagtacaacagcggtgacgagcccatgtcggacgactcgccaagcgctgtggaaggtgtccatcccatccgcgcctagccgagagggtcctcaatagtagcgcgacgtagtgttgtatatatatatatttcttgccatcgcgattgaataccacgtctggcactttcggtttgcagctcctcatctggccgtcattttgctcggccgtccagtccgcgttaacggctgcatgatgactttgctagcatcttctctcggctcctccaacctccctgtcgcgggctatttccgccagttttgaaaggtatcatcagcccaaatcaggaacaaaatcgcatctggaccgtgggagtcggcaaaacacgccgtcgctgatgtgagaagacgtacttcgttgctaatatgactagacgatctcacgagatgccgatgaggacccaaagccgttgatttgatgacctataggcgcaggctaaaagggagaacggtttgcctgctaggccagacgtagagattcgaacaggcttgagagcactccgggcctcagcggacccctcagacgtcgtgaaacggctgggctaagctggttgagcgacaaataccggcatgaatcgatcagagaatgatcccggcgggcgagcgtagtggagatctgcagaccaatggatgagcttgccttcttttaggctacaatgcaagcccgctttctgcttggaatgcgtgacacaagttcaaggttgggtcctttgtggcgcaaggtcgcgcgcgctaatatcgttgagcagtcatcgcttgggatcacgtatgacaatacgtgagttagttcatgatcacagaattgacgaccgattgcatgaaggactgaagtttcaagagttgcggaatgaattcggaaacattccggggcacaagtcaccacctggttcaagttcacatcgtgtctgagcatatagacaagccaaaaaccccctaatgtacattccaaccaccaacagagccgtcacgattgttggcatcggtttcactaacgctgacgttgactaaatagctcagtccgtcctcaacatgagcattgtactgaactctaacattgagagtctggtgcggcatattgggaaagaagaagtggtagaaacgtgccttgaacgcggacctcctcgaccgagctgaacgaagtatcgaggggcaatccataagaaacgtcactcacgaacgggccgcctcctcgaggggacaggtacgcagaaggaatatcggacggggctattacgattaagccttgctgtctcaaattccggaactcgcttgagtattgaggtacaggtaagagttcacagatctgaggcgaggggagcatctgagccgggggaaaaggcgtatatacggttctgccgttccttgggtgcccttgtggtcaggattgacggctatcgaaaaatcatatctggtattctatctgaaggcgagaagaggaagacaatcgcgatcacgcgacggatcgtcacacttgagactgttttgtaaagatagccttctgcatatctcggaacggcaaggcgtcgagttccatttgaatgacccccggaatcaacgagattggagaagtctacgaagaagctcaaaaatagacttcaaaaattcgggtactagaggttgaagcgtattatggtgatatgagagatcagtcacacggattgagtgagtgggatcaggtgatcgtcatccagggatcagcggttgaaccgtatcccggaagcaatatacccctattttgcttccggacgacattgatcgacgacgatccgcttcgggaaaagccgaagccgaattgaactggtgcagttgattgttcatccggcagacatgttcggcctggaatatgagatatcagttgctgagcttgcactgtgtctagcactcttatagcttattgtcagactatcaactcatatccatctcaacctcaatcactccaaggacagacatgacgccagacgaatacaagcctgagcaaagtattggcgatctgtcctcacaagtatggctcgtcacaggaggtgcgtctgccgagaagccccatctcgccattttcttgccctcttgattctaacggctgatccgattacactcgtaggtactgctgggctcggcaagcagaccatcctctcgctagcccctttggaccatcctcctgcgaggatctactttaccggccgggagtcttcccgcggccgggctaccgaactagtagacgaatacaggtccctcttggcacccgccaacaaggataacagccgggccatcttcttgccctgcgacctcacttcgttcaaatccatcaagcacgccatgcagtcgttcgtcgaccaggagcgtgcatctacgggggacgacagggtctcgctgcacgtcgtcctcaacaacgccgggatcatggccgtacctcccggccttaccaaggacgggtacgagatccagttcggtaccaaccatatgggccacgccttgctcgttgagctcgttctcccttacctgatcaaaactttgggaagtaggatcgtcaacgtctccagcctcggagctgggctcgctttccgaaaatccaccctatttgacccgacccagatcaagaccacccaggagggttggctgggagctggatggtggagatatggtcagagtaagctcgccaatatcctcttttcccgacaactagccctgcgtcacccgagcgtgacgagcgtatcgatccatccgggggtgatcaagacggatctcgtcaatggattgccgtatggacatcgtttgttcatcgggttgacttcgagcgcgatgatgatcagcctcgagaacggagcaaaaaatcatctttgggcgtcgaccgtgcccgtccaggaactcaagaatggggggttctacgagcccgtaggagaggtcggcagggaatttgccatgaccaaggatgccgagctggctgtcaagctgtgggagttgacgcagaaggaattggaaggctggaaattggataggccttaagctatcgttggctctgattcaagtggttcatctccgtcgcaatgtatatcagttctgaactcgggtttgtatcaattcttctagtgaactcagtgacatgccccacacattgtgactaaaatctctcgattatcggtcctgagatgcctggacgcttcagtataaaagggacttgaatttggcctcatggtctggcacaatctaatcaatgtcgtccgctcgagcgaacagtcggactggctcggaagcaacgagatgagagactcaggtatatgcctttgccgcgagagctctgataatggagccacgacgaggtgtttgtcacaactggaccttgaagattgctcgacctaccttgagagatttgccacaccactaatgatcaactttcgaggcgacgcgcgcgttctggctcggttagcagcaagcaactagcaactagcaactagcaactaggggggaagctacgggctcggatcatatcctcgaatttgacatcagtcaagtttgccaagtatcaccagtagtatcagccaaagtttctcactccaggtacagaacagttgttaaagcaacaaaaagacggcatgtcaaccccggccgaggcgaatcgatccgccctggaccggctcaaagctgccatcacggccaagagaaaggcggacgaggcgctggtacgttgcggttgccatcgaattcttgcggcgccgccttgcctagcgtttggctcacgttccttacctgatgacttgtcgcttgacaggcgaaattggagcaccagatttcacgtctcgaggagcactacttgcaagaaacgagcgcttcggggaacatcatcaaggtctgtcatccgctcctttgatcttgtaaagcatatccgaccttgctgacactgtcatcgtttacccgttgggaactaacaggggttcgagaactatcttaaacctaccgccgctcagcttcaacgaagaaaccacccggtcgtcaacgacgaggacaggttgttcagcgggagcagcacgtcgtatgaattggtacgtagaatcatcttccccttgtggactgacatagagtatccgagtcggtctagctcattcttgccttttcggacctcttgctcagtcgatgcaactcttgcagaacaaggcggacgaagaagctcggtaagtcgttcccgtcgtcacgaaatgacctggatgctaacccggactcgttttgcaaacctcctcagtcgagcggaacagaagcaagccgcactcgaggctcaacaagctgccctggctgcatccggacatgagaccgggacaacacagaagaaacgtaaacgagagcgagaagagagtgtagcaacgggagacggggagagcgtccggccagctgggaaccggaaaaagaaccgggtggtggacgacgattgacatggccggaccactttaacatatagatgatcgtgatgtggaacgaaagttgtacctgactagcagattgggaaataccagttgtatcgaatagtaattgaaagacgatcacatcgaataatgaggagacgttgcattatacgatagcatggacagctcgtcgcgaatgtaggcatacaacgggggtcggaacgagattatgacgactatcgcttgtgtttcttgacagccttttcgaatctccgcttctttggtccaccggctccgcccacatcatcacccgtacgttttcgactacgctcgagcatcgaatctcgctttcccagccccttgcccacgtcgtcccacatgcccttgctgttgcctcggtcaccgagtacaccttcgagctcggcctcgaatccgccttgacgtcgactacggctgcgttgttctccgccgacaccgtatcccatcaagagtgccgactcgtcctcttctcgtcgcttggcatctctcttcctcatgaccaacctcgtcatgttctcctcttcaaactcggtcatgcgttgcaactcggccattcgcttggcagacgtcgagttggaccgcagattgtcgctcgccacgacgggacgaaccgacagacccgaggtagactcgagaccaggcgcattggtgagcgagtcggcgaactcggatagcaatgccggtgctcgtcggtccgcacgtttcgtatctgtcgcacggaaaaaaggagagcggtcaacctaggccgtggaggtctctgaccacgatcgtgactcaccttttctgccctcgttgtagggaatagcgccaagacggggtgggcggtagatcccatcccgagcctgctcgtcttcgtcctcgtcgctaggagtgagcgatcgcctcgagttcttgattcgtctcttggctctggcatcgtccctgtcctcgtcgtcctggtcgacgtccctagccttgccagccaccttggaggacaagatggcgccaacgttgggcttgtaggacagttgatcctgctcttcctcttcatcctcttcgttcttgttaccgctcgactctcccttggtctgggtggacgagctggcggtagaggcgagggcgacgagcttcttgacctggtaggcgaccttgctctcgagcgccttggtcttttccatcacctcacgaatgactcggagttcctcctcgacagcccgggagaccttgcctgcggtgtctagggtgggcctggatcggggtgccgaaaaggtgcgggcgaacgcctcgacctcgagttcgtcttcctcgtcatcgtcgtcgagcaacgtcgtcagtcggagaccgagcatgatgacgagctggtgcaacgaggcaagaagtaattgaggtcgcacggtcaacagggtcaaaccggccgagtagtcgagatcaggatgagtcgggtcggactctgccctgacagggaaaacaaaagtcagcaagtcgtttcttatctagagatgtaaacggcatcgagcactcacttgttgaacaacgattcgagggtcttacttgtggcgacgacggaagtatcgatggtatcgaatagctgggccagctctgtgcccgaaggcatgtcgggttccacgtcgctcattgcgatggactatctagatcaagaatccccaaaggcatgacaagccatgtcagtatacgtttcaccaaacggtgaaggtcgagaatcgagtcatggcggattccagatcggaaaaccacggcgtgagacgtggaagttccatcaagctccacacagatctgtcgtttgatgtgtcttttcagtcgcgagttttctaggctcgccatcctctcctaaaggacgatagctttctaatcaaccccggtaagtcgaccctgtaaaagaggtatcgctccagagaatcattgcccagtgcgtaaagcccgcatgtagcggacatcatcattaaagacgacgacgacgatgtgtgcgatgagggagagggggttggaatatgcaatcgcggtagagatactcacggcttgacaggcgtgattcccgccctagtcaaaatacgaaggatgaaacgagaagattcgggctgatatcaaagtcagagtatgtgtggttgcgtggttgtcaacagccaagtatcatgaatctgccaaattttatatcgagcgcgttcaaggagccaggatcgaaaaagcggacattatcacaaaattgatgcgatcatgtccgttttcagctttgctcgacccgctcacaacctgcaacacgccctcgaaccatgccaaagtcgtcgtcaagcgatgtatgctaacaagacgtcgggaaaaagtcccaacccgtcatgcacgtcccaccggaccgcacgcgattcgaagacaaaaaagatctctcggggcaaagaccatattatgctgcatcatttcatggttcgtttgcatgtacaaatcccatgtcgtcgcgccatcatctcgaatctccctctcttgcttttttgaagggttcttttccccggcgggtaggtgccgtctaggccgaaggagtggcgtaagcagcaacgtggacggattgagcctggtaacatcgaaagagaatgaaagtcagtggagatgtgcggtgagatgaccaagcgcgcgtgactcactcgtccactggggtcgctcgagacacccttccagtcggtcctagggatccacctgatggcggtgctcgcgggacccttgccggggaagatggctgaggagacgggacaaggtcatgaatcgactcgtcagtccatcggttcatgcaagggccatcacgtttgacgagcgcgactcacactcaaagatgtcgcggtaatagtacgcctccttggtcgtgcatcccttgtcctcgggccacctctcggatcgcttggcgaacgcctcgtcgctgacggatcgctcggcggcgtccttcaagctgttgatgtggtcgtacccgacaccgtcgctgaactgttccttttgtcgccagaggatcgagtcggggaggtactttttgccatccggagcgcagtcaaaggcttttcggatgatgtactgcgatggtgggaggggggagggcgtgtgacatgtcagcagtgtcgctcgacgtggcgcttctcgatgagtcctgcactgaccttttccatataaggcttgccgtccgagtcggtctcgcccttcttgtggagcttgtacttggcatcgacgcccatcgagattctcaaaaactccttgtccaggaaaggcactcgggcctcgacaccaaacgccatggtcgctgtgaggtcaaacgtcgagtcagccgtgcgatcccctccatgccgccccgaatgaaacgtcacactcacacttgttggcacggagacaatcgctgacgtgcaagttcttgacccgcttgacacattcttgatggaagatctccggggtaggggccgcgtggaagtagaggtatcctccaaagatctcgtcggatccttctccagagaggaccatcttgacaccgcctgccttgatctttcggctgcgacgacgatgacgacggggtaagaatcgggattcggggatcgtcagcgaaggtccggacctaaagacccgcgaagcgtcaggaagcaagggtagcctggaaactcacctcatcaagtacatgggcagcgaggcccggatggtggtcacgtcaaacgtctccaacgcgtggatacactcgggaagggcgtccaagctgtgtcgcgaacccgcacgtcgttcgtcggtcagcttacacccgtgccccaatctcgcactcgcactcacgcctcgtgcgtcgtaaagacgtattccgaatgcctcgttcccaaaaagttggcagccttgcgggcggccaacaaatcgggcgatccctcgagcccgatggcgtacgagtggagagctccgcctgaccacgagatcggggtggtatccagggccatcatcgacgggtcctgtgctcccaacggggtctgagcgccactggccgcgccggcttgcatctttctctgaacttcctccatggcggcttgttgttccttggcgatcttgttcatctccctcgaagcgatcgcggcgaccaagctcgagtcgagacctcccgagaggaggacaccgaaggggacctcggacatcaaacgtttcctcacggccttttccagcgattccctcagagccgtcagatctgcctctccgtgggggatgtcttcggggttacctgaatccccgttccaccactcggggtcaaagtaccgcgtcgtctcgcccgtgttggaatcgtaaacgtgaccgggagggaaagcctggatgacgtcgcattcctcttgcagggatttcaactcggaggcgaaccaccgggtggacgggttggcagagttgtgaccggtgtacagggtggtgatcccgatggggtcacgggcgacgaccatacgcgaaggtgagacgctgtcgtccaagaggatgaacgagaacatgccgtcgagcatgttgcacagtccggttccgtgttccttgtactgtagccgagaatgggcagggggtggttcagcaagcgggttcgaacgcgatacgtgatgtgcgagttggggggatactgaccagatgcatgatgacctcgcaatcgctcccggtgacgaggggtacgtccctgttcttcaacccgttgatcaagtctttccagttgtaaatctctccgttgacggcgcaggtcaggttcttgtttccatcggcgtagaccaagggttgagctcccgagtctgaggcggggcggggcgcagacgaggacgtggtgtttagtcacatcagaccaccaggacgccgccctcgccacggcttgaacttaccgacaccgacgatagcgagacgttcgtgacagaggacgctgtcctttcctacccaaacgcccgaccaatcgggacctcgacaacgttgttccttggacattctgacgcatttggctctgatcgaggccgggttgccgtcggcgcggtgacaacctaggataccacacatggttgcgaggagatgaaggttctagtgtgaggcgtggtggtggtggtggtggttgtgttgatgacggtgatgatgatggatgtgaataccaggtgggtgtgtgtgtggtgatgattatgaacttgttgatggtggttgcctctgacccgaagcttcgaatctgtgactttggtggttttggatttctcgcccgagtcacacacaacttggagagagttgagagatgagaagcgcgccaagccacgagccaaatcaccctcggaagcagaacacgcggtcaatgatcgagggagatagagggggggagagggcaagggataggggggccaattaaaagcgcgacatgcatcggatcacgtaaagcttgttgacgttatactttacgtcatctctacctttttatcttgggtggaaataaactcccccgagcgagagttgcatttgtgacaggttgtttacactttgaaagtcgaccatcatcgccatattcacctggttcactcgctcactcgcttgttgagaatcaaaatcataccatctccctgattctctgtcttgaacgatcacataccacccttcttcaactccgacaggcagctcaccattggttataccccatcccgacctcgtcaggatgtcaccgcaagatcctacgccggcgctcttttctcaactatccatctctcattcgaccagctcgatctccctgtccaaccatcctcgcgaccatcaacatcacaatcgccttaccggcaacgaccacggtgatggcaatgataacggtcgaccgttaattcagagcgcatcggtacagtcgggcatgtcactcgagaccctggaagacgatgacgacgacgacgacgatgaagagatgctcgggtcgttcgggtcgaatcacgcaaagaacggacagagtcgccacgaggatcatgacgtccaaacggaggaaatagaagaagaggaacaagagtcgaggcacgtcgcgtccaccgatcatctagacgggtcccctcgtcgtagctcacccaaggggatcgtccatggcaagtcccatccccccccccccccccccccccgggtcagggttgtttgtcgacattgaaccgcaagtagagggctgatggtgttgttggcagggaggactaggacggtcaaggatggggagacgaggacgacgaccgacatttcgatcacgccgaagcaccgtatcagacgagtgcggcgaaacaccattcaaccagcttttccttgcatacccaggctgctcgctagctcttttcgcccggattctacatcggtttttgggagcatgtcatttcatgggagcgatcgccatcaagttgtatctatcattattcaatgtcgacgtcaggtcgtgccgattgacggacgggaagtgaacgggctccaagggcaaggcgggccgcgacgcgatagcgtcggggcgggccaggaaaaagggagaggaggagctgaggcagaatgatgcagggaagatgctggggaagataagagagagttgggagggagcggagaggacgtattgaaggggattgaagctgtccggcccgatgagggcaacggctggtgaaggtagcgggaaacatgaaaattgcggacaaaaagaaaaaagccagaagccggatttgaaccgacgcgggcaaagcccatcagataggtttgatgattcaaatctgactccttaaccactcggacatcctggcctttagttttcacacaacaccaacaggaacacaccccatgaacacctcttggggctggctcaatctggcatgctccaacagcaaccttccttcagacaggaggaaccaggtaaggttagcagagcgcaggcatctttacccattagagtgcgcaagaagtggcataacagctcagacagaccatcgtcttcgttgggtgttgaggaagtccgtgacgggaccgcctcggagatggccattggagacacaatctggggctgaggtacgacggcagggtctaggaacgtaggttgatgacagatggagggctacgatacgatgctacagcacaggtcatatgacacgccacagttgcgtctgtgtgacctcctttgtggtgtacgcatgagatgccatgacagccaaagctcctgtactattattgaaagaaactcaacctttctccggctcgatgaaacagacacggccatccaagcatgcagcagcgaatcacagcaggctgactattgcaactgtcggtcccaaattgttttgtcacactctgcatctcttcgtcccgactgaattgcgatgttgcggccggagccctcaattgtcggattatggtatggctcgtgccgactaggaacaacgcgactctccattcgaggccaaaggatgtgaatgctcatggcgcaacgttggtcatcatgcacattaccttgtgattgagcttgaatcctcgtcttcgtggcacgaaatcaccatggaaaggagatcgaccgccgtgcgacgagtactcgtacgtatgcgatcgttctggtccgtacaaatacagccggcacgctctcccgttgtgcctctttgagtaaactgcttcgaaacagtctcgaccaccctctcgcctttaatctcctacaaccccttcttcttgtcgccgtcctccttgtcacgttcctctttttccttgcgtcccttttccacgtcgctcgccttgacccctgccttttcagccgccgcctcgagcgccttcatctctgtcgtcttgttttcctcgacctcggcgttgctacaggcagagtgacagggtggttgcacgtcagcgcgcatctcgtatccacattgacggtaatcgccatgtacgactcacgaattcgagattcggttttcgactacacgagaagaaaaggtttatacgtcagccgacttgacccggcgtacgaccccgacccggcctatcatggtgatcgacaacggccacatctcactcactcagatcgtgcagggcgaggacggacctgatgagactgctcaggtagacgaccaacgactgatcgttggtctccaccctgaaagccgtcctcttgatctcggcctctcgcgcgttaccatcgaggtcgggcaagaggttgaaaatgtcctgcaggttgtacatgatctgatggttgacggggagtttacccttgccgacgagggcgaggtaatccctgatttcgatcaatctcgaatggagccccttgagcgaggcgatctgggacgagacccggttggacaagccgccaaattggtggggagacttgatgtcacgcaagaggtgctcgacaccgatctcttcggcttcttcagcttcgaccgaggaggggatatgggcgaacgagagttgagtcgccgtgccatcctgtcgagtgagggcggggtgatcgtcgatcagcgacggcataagcgggcgggcgatcgcgggcggggggcggcggactcacatccttgatctcctcgaccgcaaagtaagcgtcggtcgggatccctacatccccacgtccacccgtcggtcttacatccacgatgaccatgacctgtatacatgccaacgtcaccaagtcgaccagcatcaagacaaagacggatcagccccgcctcggcgtctctcttcaaaagccacagccgaaaacaccacgtgcgtgtgtagaattccgactcacgggcttgggcatgaaccttttcaacctctcgctaatctccaaatcgttcgacctcaattgaggacccgtatgataaaacccgatcggtcgttccttggctatgaacgtgatagacgtccgggtcagctccccgcgcggtactgagacgactggcggacggatgtaaggtaaaggaggactggaacccaccgttgaccttgcggaacatctcccacatgctctcgatatagtcgaggtccaagaaccaggtcttgggatcccgatcgtcttcctcgaacggtacggcaaaactgggtgttgtccgatcaaggcgcgggccaaggcgaaagggggggggggagagggtaggaggtggatatgatgagggtcagtaccatgacgacaggacgacgagacaccgcgggatcgacctgacgagactcacgaattagcgacgttgatggtcttgccatcgttctgaccgagcaagatcccgaggatcctctttctcgacgaggtcggtactcgggaagcgtggtcgaccacctggagacgctcgggacgagaaagttagcaggggtgaacccagtcggtcgagataacgtataaggtaaaaggcgggggctcaccgagaggagtacgaggggatgaatcacgctgtgatttagagggcgaggacgaggacgagcgggtcttttagtgatcggttgacctcgcttcgattgacaggtaggtcctgacaaactcacacgttggtccccgcgatctcatcgttgatctgcaacgagagagagaaagagagagagagagagaaagagagagagagagagagagagggaggttgtcgaggttgagcgatcgcaaggcctttattagttacacgctcaggctagggtcaaacgcacctgagctgtcgtcattccacccattttgaaatctcgacgtctagtctagtctagctgtttcgttcaaagttgttggtcgtgcgtgattattccctagttcggtcgatctacgtgtatgctctatggttgttctttgtgtgtggttagatcgattgcggtgttcaagtggacgaccccaggtgtatgatgtctgatgatagacccagttgctagttgcctggttgctttgaattggcttgtatggtgatggtgatgtgggtgtcgtcagcgtcaaagtagggacacgaacagcagcaaatgattatccgcggtgcaaacacagattacaacttatcatcgattcgtcatatcgatcatgcatgcagggagggcatcgacctcgaaccaaaagtcggttgacattctacaccagcctatcttcaccatcatcgataatcaacatccagccaatccacaaataagtaacatgccgaaaccaacaaagattaccaactccacacccaattcacgagaagagcgagtgaaatggcctcccatccgacctaaaaagggtttgaccctcgaatccatactcgacgatcaggtttacgttatcgacgtgagttcggaacacacccagacccacacactctctctattttaatctacttcggcgccccccattgccctgccccgagctggctcgaccccagtgatactcacatcgatccgtcggttcagaacctcctcagcgaagaagaatgcgaggcctttgtccggctaggcaagacgctcaagttggaggacccaaaacctccaggcaaggacgaagcgacgaggacgaactgtcagtcattcctccctttcccccctcaccgagccagccatgcacgagccggtgttcaagttcggcatcgaaggcactgaccttccacgtccgcttgggtctccttttgtgtgggtcgacagtccggttccaggcatacgaaccctccctcgccgaaaccctgcataccgtcctctccccatacctctcctctggcccttcttccccattttccaatcctaccccgcctaaatccctctacccgaagatccgcatctatcactacccgccatcgacctactttggtcctcatttcgacgaatcctccacggaccccttgacggggttccgatcccggtggacgctgttgatctacctcacaggcgggcgggacgtccagggggggtcgacgatcttttggacgagggaacctaatagaaagggcaagggaggggagaacgtcaaggtgagcctcaaggcgggaagagccgtcctgcataaacatggagaagagtgcatgttgcacgagggggagatggtctcggcgggagacaagtggatattgagatcggatgtcatgtattgatcgataaagcagggagggggccaagcgtcgggtcatgtagcatgtatcccgatcaacatggaaagcagggtctgttcggttctcagcgtctgagaatcaaacgtctgtggcaaatctccattgcaaaagtcaaatccatgctcaccttcccatgataagtaggttcaattacaaagaaagaaggaacaaacaatttcgacgactcggcaaacgatcttttggtgtgcggtctggggtgttcgaaacgggtctgagatgtaactcactttctcacgaagaggagagatttaggtcagaggggccgcagccgaagcccggaacggagaccaggcgacgagtcaagtggaagacaagtggagagtcaaggaaggagatgagtcgcgagactagcgggaaagggggagatatggcagaggaacaggaatgcggtagatgctggatggactgacgggccgcaacaattggcccgtgacacactcggtagccttgtcactcgaatctgagacatgcgtgttgcgtgtgtgttgccaagtcggtcgaattggtaacgtgtgtgtcgccaaagaggatgctccggactgcgagcaagttgcctctaagtaatgatcatgagtaggacaacaggcgagccgggaaaacccccaatcaggccctcgaatttgatatactcagaacaatctacttggtaggcttcgaagtgggtctcaaacgaaggtttcgcatcgttcccgttccaccgttggatccgcactactgtttttcaacgagtctgcgcttgcatcaggatcggaatccttgcatcagtcggtatctcttttgactaatttagcggatattattgtgagttcgttattgtggctgtactcgaccagatagaaccttttacgagtaatttgctaaaaggcttcgtgttcttgaatgaacgcaaccgtacctatattaaccctggccctttgcacatctgccccaatatgccgctaggctgaggtgacaaagcgaggttgatgaagtgaatctggcgcgatcgctactccttatttcgactcgctccgcgtgccaatcctcacgtaagaatggtcgaactcaggggacataccaccatagtatgccgtacggtcagcccgtggccgacttttgtaccgaaatgaatcacttgctcttggctatcatcgcggctaataccattgattccaagctagccactgggtcaccatgagagtcggctggaacagtcatgtggaaccaaagatcagagtcccttgccagtttccctttttctacagaaccccctgctgtctccaaccggatagatgtcttccagatctcaggttatcaatgcatagtacagaagagcacaagttgttccatgccgtcaatcatattaccgactttgacaacaacagcagtggggtggcaccccggaatgggccaagccttcgcatgtaggtgaaacgcaagcccgagcgcttaggctatccgcaacggtacgatggcccggaatgaggatcacattgctgtgtacaaggatgatcagcacgattggtgcacccacgatcgtgatggcgttgcgtcataaacctggtgccagccatacagaccttttacgaacgcgtgtcttctgcgatacctagtctttgccgcacatctcgaactcagaccctaaggctcagtcaaattgtctatatttctccaatcggtttattgctacatagcacgaatactgatagaatcgcaaacaacgcccatgcgcgactgcatcctctagttcttcctgctcctccatgccatcgctccgatggtgaacccccagaaggccattacccagagcacggtaataccaatgtttcgccaaccgatatagctatccgtgatgtcaagagtcctcaaatattcgtttccgttcgcgtaaccacagtatcgacagtcggcattcgcgtccgggttgtcgacgtatccagccgcagatgcaaggaaatcggacagatacgctgatagagatgacgtcttcctggtcaaccagcagtcttattgaagacatgatgtggcaactcaccgccacaagtctcgccagcaggaggctgcaggacgctgaattcactgtctttgcaacggatttctacattccagttgacaaagaagattttccctcccaaaatataagaccacggatctgagatgtggcgggtcagcgcttggctctctggaaacagcgcagaagggaaaggactgactgagatagtatatccagtatctaaaagcatcaggcgggttcaggtagtggtcaaattatcgatttttcccgaagaaaaccaaaagataaccaagcggaaagagaagggaatcagcgggatccatcgagtctccgatcgcaagcaatccaacagcacgcacctccaccattccggaatttctggaagagatcagagataaaggtcagtttgacgggaatgtgcagtatatgctgggacgagcttacgaggatatgggagaagctagagtaatgttgagcgaagatagggcgagatcgatcgatgtgtttgaggcgttgcgattttggtacggagatgtcagtttcgattcgccacatgatgagcatctgcggacgcaaacttacaactccgctgcaaatagaatagaaagtgtcacatatcagtgtctggcctcattcgatgctttctggagaaacgggacttacgagaaactggcaaacaatccaagaggaatcgagttgaacagcgccgcagcctggatttggaacgtcaataagcacgggcaagcttctcgcaaaagaagtgcaactgacctcggccgtaggtgagcagatcgctacaaattgagcaaaccctccgatccagaggaagtagaggacgtcttgaaaccagaaggagcctccgtggtaggggtccgtaggtttcgaggtccagaagaccaatgggaaccacgcggcgaagttgagaatctgagacatcaggagccacgggatttccgtgatgatgacgctgaaaatgaacgggaaccagccatacatcttggcacccttctctcgactttcgtagagcgtcctgacttcaatgactcgcggttgcaagatgttgaagagtcctggagcgacaaacatggcctgaagagtcgattcgacgcaacgcttagcatcgttccggacttgttacattgcctttgcgcttacctggaaagtggccaacagtctgttctgaactgagcggtagtcgttggtgtgtacagccgtgacaaaggtgatcccagtgatcaatccggttccaatgactaaaccgacacgccccagtacgtagtcgggggttcgaatgatcgagctccaagccctcgaggtgaccaacttggtttgcatcttcaaagacgatgcgtagtagagtccatcctcctcgaaggaagcgggcttgtcctgggcttctttaataacgttatcgacttctgcgctgatatcgttgtattcttccgaatcgagccagacctgggcccaatcgtggcccttggagcgcgcacctgaaacaatatcgatcatcgcttcggcagcgttctcttcatcacctatcttggcaccgtgcttggcaaagtatttcttcatcgtgcttgcgtgtttcccgagctctccattgtaaacagttcgaccacccttggcaaggagcagaagagagtcgaattgctcaaataacaaagcggaaggttgatgaacggtgactatcgatacgtcgcgggtatcagctgatgcttcgcgatcatggtcaagaaggaataggggctcacccagcatggattgccctgctgcagagagctttttcaggaatcgaaggatctggtaagcactctgaccgtctataggagggatccgttatgagtcagctcgtcccaatggagagaaggtcgaattggtgttgaacgcaccgagaccactcgtaggctcgtccaagaacagcagcttgggcttggcgacgagttctacaccgatggtagtgcgtttcctacgatgatgatgtaagcgagggatcttgaaaggtctcgaacgagcctgctacgaacctctgctcgatcgacaaacctgcacccggcactccaatgatcgcgtcggccagctcctccagctcgagaatctctatgaccttgtcgacgtagctctcgatctcatcgtccggtgtatcccttggctgacgaagacgggcactgaacatgaatgcctcacggatggtctgggtgggtctataatcagggccaaaggcatcagtctcgctgatcgatgcccaacctctgcagctgaacacatactcatgaacgtccatttgaccgacataaccgcatgtgcgctggaacgaagggccaggagggcgtccgtcgacagtaatatcgccttcaatcttgccgtcatcttttcgagcgcccaaaacatcgagcaaagtggtctttccagctccagaggcacccatcagggcaagcatggcctgcggaatgtattccctcaatcaggttatgtaaccgtatcagcccaatcgctctactcacacctggtttagtgaatccttgaaccttgttgagaagctggcggtgcccacctcgaacggggacagtgtaacacagatccttccatgcgaatagcgtctccgatttgtcaatcttgatatcattgtctgatcgaacaggagtgttctcgctgccagctgttgctgcgttactcgattcgacgtcgtttcttttgccagtgacgtgcctccttgcgaagacgaggaaagatttgacgcttccagctgccttgagacgttcgacggcaaggcaagtgatcaccaagaagaccgcccaccacatgatcactaggccgaaatctataggacgttgcacaataccgtcaggaaagagcgtcttaaactccgttaaacaacctttacttacttctccataggtggcttggtcgatatccgtactgcgtttcgatgtaagccctgccggaaacctgcgtttcgccagtctgagctccaggggcattacagactgtccggttgggaccggatggtaagtacggcttagctgaacagcgttacgaaccccatacacataccgatgttgtttcctgaggttgggtacccttgcccataggggatcagcgcgggagccgcgcattcgattgtggttccatcgaactcgtttatgaacgcagactcgagcgaatagaacagaggattgagatacttgaaccatcctacccaccacggtaattgagcactggagggttacagagagagcagacgatggtagaagggcaaggggcgaacatagtgagctgctgagcacgatatctgagcgatctgttaccgtcatggcttacttaggcagaagataccccatagtcaagatcagaagctgtgatttcagtccaactcagtcagaaagatatataggaggagcgagagtgttgtgcaaacctacacccagtgcaagacttcaaacaagggagacggatgtcaacttctgccgatggcgcaactctcgcggaagcaaaaatagtactgacccagaaactgctcccgacgcctgaaacgagttgaagccgaaaccgaccatacgaaagaaacctgttgacccagaacagcgctttaagtaaagccattgagctgcgattcgcgatagcggcttacctaacagcgaatgggtggtaacgtaggtgacgatccacagctatatgtttcccttgcagccgtgagtttgattcactttatcgttagccgtggaactttgaactcacggtgaagaaggctcctgcggtccgtcgcagtcccgacatgaaatagatgggaaccaagaacatggtgacttgcagagccactaagggaatgtcgaccatgacttgcgcgaaaatcaaggcggaaggccgatatagagccatggctttgtgcttggccaagatcgtccttcccttgaaactattaacgacttccccgaggccaagcagcgagttgacaagcagaatcaagaacagcacaccggcctttccgaagagtccgttcgtggtcctgtccaacatgtaaaacaaacttcccaagataagggattgcacgagcataccgccctgtttgatcccgagcgacgccttgtcgttccaggtcaaggcgtattgccttcgagtggcactagcaacttgcgtccagagcgtagtggtgtaaggaccctttttgccggccctcttggacttctcaatttggacgttcttctggaggtcctccgtcctgaggcgcaaagtctcctcgtcccgcctgagttcctcgaattcctcgagcattcgagcattgatgtcggaccgcttgaacaaggcggcgaactcctcgggagtattggggacttctcccttcttgtcgtcagcgaccacacgctcggtagcgaccgtaacggcagtcaagaagtcggacaagttagatccagggctgacttggaagcccatgtcttcaaagtaacccctagcttccttcataggtccccagtagatgcatcgcccggcggcgatgaccaagatcttgtcgaaaagctcgtagatctggttaccagcttggtagacactgataaaggtagtggtcttctgatagtcggtaatggtcctcatggcagcagtgaactccaaggccgtcgaggcatccagacctgaagtcgacggagtcagcgagtcatccaacgattctagatgaagatgtactgacctcgagtaggctggtcaaaggcgtagaccggggctcggttgacaagagcttcggccaaagtgactcgctggacggcataggggttcaaaaatcagccttgaaacaagcgcaggtcattggatagcgcgagcatgctaacctttcgctctccaccagagacacctcgcacgctctcatttccgaccttggtgtcgacagtgtgctcaataccgaaggtcttcagaagagtgtccctgtaggacgcttcgtactcctctcgcgagacaccttcgggtcgcgccttgtccgagggagttcgcatcttgagcgcgaacttgatggtctggtcgacagtcaggctggagatgaacagatgctatggtcagcagggttgcttagcgcctaggtcagaagctagcgcagactcactcggggctgtagttttgcgtcgagtgcatattccaaacagtgcaaaaaggttcagtcacgataccttccgcacccacctctaccgtgtcactcactagaacacctcatcttcggcgacaaactggatttgcgagctgtatcgctcggcctccttgctatccatcgttccatatcggatgtcaccatcgacgccggcgtatccttgcctgatgttggtcaaggccttcatgaacgtcgtacatcctgcaccaggtctacccaggaccaacgccatctctcccgacttgaggactcccgtaaagtcctcgatgaggaacttttcgttttcgcccaattgggatccgtggttgggaagcgccttttcggcgtccttcttggcctttccatcggccttgggcttggtgtctttttcgagatctgggttgagagcctctttgcgcctcttgtcgttacgcttagtcatggggttgaacatgctcttcaggtcgtcagcaaagacggcgtcggcgccgacaccccggacgcagaggtctttccacgaaacgtcgagcctcctaggcctcctgccctcggcttcgtccctctcggcatccctcttcatgaccttttcgagggaccatccgtccctctcgttctcgcttcgtcgagagacagcccgctcgaaagaggagacgtcatcatccgggtactctcgctgttgtcgaccggaagtgacccggctgatcatgctggtcaaggtcgagttacgagtcggttgagcgggccttttcgggctaccttcatcgccgtcctcaggggtacgatggtagacgggggcctggtgaggcttctccgagttcatcgccttctcgtcttgaattttcgaaccggacccagtcgactgtttcgggctggaaggggcgagcgtcggggtagagctagagtcatccacactgcttgttctcgaataatgagccgttgcctcaacggagatgggagcgcccaactggacgggaaccccagcagacgacatggtgttgaagtctctgtcgtgtggtatgcgatcctgatgacagacgttatctgatcggaggatcatctaaagatcgttgtgatgattgacccctattcgatttgctctgtattgtatttgtatgttggcccacgctgaccttttaatttctcgcttagttcgatccgccgctaccaccgatctgaccggactcgacccgccgcccggccggatcgacccaaggcgtgatctgcagcaggcgcgggcacggcggagaagggtatatcattgccctggcgaaggccgtggccggaggattccccccgagtcatcacacgtgaagcgcacaagaaccgcaagcggccagtctggcagggaagacgacgacgacgacgactttcttcttttcttctttttgaacgggatctgattcgatgacgcgcgtcacctcggccatcgctcgcggcagacaaatcgattgataacggtgtgattacaaacggggatctaccaccaattctacaacgactgatcaccgctgacaacggcaatcgtgctaaaacacatcattaaacgagccgtcgagcggactctaagagcgacaacaggaggaaccggcagaagacgacgctgatgatgacgtgccgttggacaccccgttgccgttcgaaaacgcatcatgagcatttctcgacttttcatccgcgctcgaaggaacgtcgagaccggggttacgctatgaatcagatgccgctcgagatcagccaaccctgtcaatgctcgctatgcttggcgaacgctccgcttaccaggaagaaactcgagggtttgagatggatccgaagatgctcaacgggcatgatcgggaactcttctgggcgtgcaaagtgggtcataccaaagctggcccacatgacgatgtccttgttggcgatgggcgcgtccttgtcgacccagccagcaagaccgaactcgtcatccccacctgggtgctgattgatgtgaacaccagaaggataaagctgatcctcggcatagggcgtcacgaacatctggcaagattgagcgaaatacgtcagcagaactcgcgcgtgattgactccttcgatcaaagcgtttcattcagaatactgacgttgtgcctggcccaaggtgctcgtttccagaccatcgaaccttcttgacagagcaacggaggcatctgagtgcaaactgtaacgaatgcgtcttggagtttcagctttcattcgctgattatcgatgctgcgctgctactcgacgcacccatcttgtagccgacattgttcccgctgtaggcgttcttcttgttagggttctcgatgctccacactcgtccggtccggccgtcgtaatcagcgacggcttctttggcagtattgtacaaagtcttcttgttgcagaatccgtttccgtagtaattgctctcacttcccacgggagcagcatcgggaacggcgtcgacctgaacgacctggttgttcagcccatcaaccatcgggtcaactcggagggagaagagctatgttgcgcaaaaagctgtgagctagggtactcgcgagcagggtttgctctaatacgatgctgctcacgtgctggtgatgctgggcagcgatcctaggggcaacaatgacctcgtgcgcatcatctctgggctcgttctcccccaaaacgtaggcattgacgataccagtcgccttgacctctagctcgaccgttccagccaggtcgaaggagaagtagaatccatactgtatcccggaggagcctcaatctccgtgatccaatattgctctcagtcgtgcttacctcgtagttggctacagtgcaaatggtagagatgatcaactttcggttcctcgcgacatgggcgcggttgtttctaaagtcggtgtgctgtggggtcaggtttgaaaaagtcagggaaaatcccaaaatacaggactctgtcgatgcagaaacacaccttgtgcaagatgccggcatcttcctcgctacgaagtcggtatggatgtcggttagagaagccggtccctcgagcaaatttagagacggcttactggatgcagatagcattcttgatggtctcgacatcaccctttcggttgttctgtgggaataaatcacgatcgttgatcagtcactcgaattgattgcttgcatcatccaagcttgcttaccccgtggaagtccagataagcgatttggcccttgcaatctagatgaataaaccgtatcagttgtgcggcaaaggaatgaccagagataacgagtagcttaccacatcccagctccagggaatttgtcaacgctccaactccatattcgcctgtaggtgttgtacaaacaggtcagagatcacgcgtttagaagggtttagaacagacggtacgtaccagtatcaaaggcgtgctttcggtgatgagggaaagtggttttggcgtactatactcgcctacgcgtaagcagagacgacttcgaccggctagactgtctatgcttacaggaacaaccatctctgcgacagacaatcggtagaataaaggtcgagtcccattcttgccgtcatcgtaggtgatgttggacaggaccaaaccctctcggtagttgaatccgacgtggaccttccaattctgccaaacgagggttctcccttcaaacttgaatgacacaccctcgggttgagtgatgtcgatcggtttcagaccttcacgaagcttaaagtctgggtcatcctgggccaattcctcgggcaggtagttgtgagcttgcatgggagggaggatcctctccctcttgccggcggtttcgtgcgcctcaagagatgaaggcgcgtcggaagagttgatgtgggggaaatcgatagtgagacattccccagtgtacgagtctgaatgcgcaatgtggatgtaaggatactgtccatcggtctcacgataaagaatcgacgcttaccgatcacgggaatcatatctaggggatgaccataaaggttgtcatttggtcgaagtttggtgaacaagaaacactgctgtagtcgcctgccggggaatcgctcatcgattccgatacaccatcctgcaagtcgagaagctcctcatcagccaggccctcgttaaagtaattggaaccttgacctaccgtcaacgtagcaatcttcgggcttgacgttcacctctgccaaagctgcaatgatctgagggtccgccctacagatttcctcggcccataaaagctcctccacctggagacttggttgagtagtcccgggaagaggggtccacgccgacacaatcgcttggctctccgagatcgatgtaccgtgggaggggagatttgatggcagatcgacaatgcattcgaaggctcgagcggtagcagcgtcaaggcagtggacctgcaaacggaaatgcttagtatgactaagagctttggacccctgccatggcgtgactcacctctgcttgacggatgatctcgctaggagcgctaaggacttccgggtcttgtactacaccggcccatttcaacacactgagcttggggggttcccgaagagtgatcgagttgaacaggagcctgtccaaggggactttgagcgcatccgagtattgtcggacagcacgagaggtcgaaaggatttcggcagatgtgagagggtcaagaggatgggcgtgcgaggtgacctgcttcttcaggggtacagatcggctagatgtcgtcatgttcagctggctggccttgtacgaaatccaccgattgtattctactcacatcgagtcagtctcaattggtgttgcaatggaaggcatggtgagttgatcgggataaggtctacgtggctgcgatttggcttcagttgaactactccgactgatgacaccttggtagggttgcgttcaatctcatctcttgtttatatcgtccttgaggcatttcggccaggtgaccggttgatccgaaatgacacggatcatgccgataccatgatctgcctgataacgcggaagaattgcgccggatgtgctagtttatccgatccgcctcagagcttatcctggctatatcgcagtttgtccggatttgagaagatcccgcgtggcttatcaatgccgaactcgttcaactaaaccgcacaatcagatgatcacgctggctgccgatagttcatggcaattccctagttcatcgacttccttcgaccccacagtagctgcatcaatcggagttgcggatcaaccgagtcgtttgatgatacgggggcgctggctaggtctgtcaccattcatttacccggtggaatccacccgagattggagcacccgatcaaaaccgcgcgtgaccatatctcgctcgctcgcgttgttatctttccgcactcttcgctcacacgactctatctatagtatgctcggctgtagcgttcttgcatcctcgtcacctgcagaaccagtcgagataccggattccgtctcacctgtatcatggcgccgtcacagcgcccctttagccatataactagctgctacattcacgcccaaggccgataattcacttccgagacctcttacttgagcttcagcctcgactttgatttcgttgtccgactatccgctacatcgtctcctgctactttcgaatccttcgggaacaagacttttcgaaaattccccaccaaatcctcctcaatctttccaaaccatggctgcgacatcggcccctcgtgacgtctcccggctagaatctctcggttatgctcaggaactcaagcgaaacatcggtttcttcgcctgttttggcttctccttctcgatcatgggttagtcataatctcggctacatgcggacaccgaccgattctaaaacctttgtctcggtttcatcgtacaaaggaattgttccgtccagtgcgtgtggcagtcgccttactaggcatcatgacctgggatcgttgaatcgttgtcttcgctctctcccgtcgtgatgttcagttgctagcacgtaagtcaatggaatcacggacttgaagatctttcgtagttgcggctccagctgatcgcacattgacccgacgcgttacaggatctggtaagttgacgcactaaagttctcgattgtccaacggtatctcaatttcgatcgcaaaggtactctctgccttatgggggaccagtagcaatgaactggggatggtttttagctggcggcctgatcctcttcatcggactcagcatggcggagctagcgtcctccatgccgacatcgtgagcgtgctcgacctttactgccggttcagcattactaatgacgaataagacagtggtggcctctacttctggacacaccgtttgggacctcccaaatatcgtaatcttctggcatggtttgtgggttacaactcgttcttggggaacgtcgctgcgacgtcctccctcgcttgggcttgtgccaatatcatctttgccgccgtctccattgccgacaactcgttcactcctacgaccgagcaaactttcggacttttcgtcgggatcctgattacggtcggagctttgtgtgcttatggtagcgagttgctcatcaaactacaaactcccaatgtcatccttaatgcgttgctcatcctggcaaccgtcatcgggctgccgattgcccgaaggaaggagctcaacacggccgagtatactttgggggactttaccaacttgaccggatggtcttccggtatggctttcctcttgtcgatgttggcaccggtatggaccatttgtgagtgcagatgtggacatctgcagttcgatcgaggctgaggacatgctttctttccccgcaggctctttcgactgcgccgtgtctctttcagaggaggtccgttgtgcttgcctccctctaccttgatttaggcttcacttattcacgcatccatctccccctctcgacaggcctctaacgcttcgactgcggtaccctgggccatcgtcctggccattgggatctcaacagtagccggaggactcatcatgctcatcttatccttgaccatggggtaagtcgcgccgatgggaacacctcgattgataccgtcgactgaaccccacttgatcagtaccgacttggttgccatcaatgaaagcgccattggccaacctctggcgtacatctatgatcaagcctttggcaagaatggatctctcgtcatctggtcattcatgtgcatcgcgacctttttcatgaccgctagtctggccatgcccgcttcccggcaggcgtttgcctttgctcgtgacggtgccttgccgttctcgaggtatctctatcacgtcaacccgaagacgcagactcctgtcaggagtgagttactcgatcgaagctgttcaaacatgtcttataactgaaccccgacgtttgtttggacagctgtctggcttatcatcgcgctctgcatcccgcttggagctctaggatttgcggacgaggcagccatcaagtgagaaatcaaaccacatgatcgtttcagatatcgtctgacagctagatctctctccccagtgcgatatttgccttggctattctaggaccctatgtcgcctatatgatccccatcgcctgccgcctttttactacccagaccttcacaccaggaccttggcacctcggtcggttttcgaagccatgcgcggccatctcttgtatctggatgatcttcgcctgtgttatcttttgcttgtgagttccgccgcacccagtgctcgtcacggtcaatacctgatcgactacgacccatgcgcgtatagcccggccgatatcaaccctgatccggcgaccatgaattacgcctgcgtcgtggcggctggagtatgggccttttcgctcgggtattactatatgcctggcatcggcggcaagacattcttccgagggcctgtcacaaccgagtacgaagaagcccatctggccgccgagtatggcgatattgccatcgaggccgacgtccactcgaacggtgacagcaagcgcgatggcaagggtgacaccaagaccacggtcagaccactgagcatcgcggactaatggacgatcaaacaggaaaaacaaatggatatgcacagttgtacccgtctcttagacgtcgcgcgcagccgctgtaaacctcatcagtagaaaacccaatgcaccagagtaaagcaggaaaaaaataggaaaggacgaacgacgcgacatgtcctgagatatgattgatacacacaacatgatcgcaagaatactaccatacatgggcctcctgtctcgacatgcaactcggctcctgcactatgcagcggccttctttgcctttttcgccgcctttcgagcagccttctcctctggcgtctcgtccctctccttcttctccttctttacttctccgccctcggtcttggcctttttactcttcttctccttcttggcctcggaaccggtaggtacatcgtcgggggtcacgtcggcgtgtttccgcgatttcttctcctttttaggctcggccggtgcttcggtcgatacgggagcgatctcgggaacggtaggagcgtccttcttggactttttcttcttgggcttttctaccgagctcgagtcgcccgtagtgggaacaggagcggaaacggtcggaacggctacaggggcaggcgcaggggtagacgagacttcggcggtcttcgagggtccagcctctgacgatccggcatcccctgcaacggacccctgtccctccagctttttggcattcgagttggctctcgacccagtaccccccttgtcgcccttcttcttgttgttgttcttctttttcttctgatcgacctcgcccgagccgttgacgccttcttcgttgtcggtcacggcagggctggttccccaactcctcatcgggacctcacccatgacgttgttcatacccgtcgccgtagccttggtcctcctcccgttctgccacttgggctgttccctagggggagggtatcgggaaggagggtgaagcgaggggaatgcgggtttcttgcctgatccctcggcagcggcctcgaccatgtttgctcgggaaggatgaaccgcaggggcggatccagcctgagtggggtcttgagcaggggactcggtctggggaggagggggtgcagcggctccgttgcggccctggggtttgcccttggggtacggctggaatcggttgttcggggtcgagttgttgccagagtgtccgttctagatagaacgtcagggggcggactgttagcatcatgaggcgatcaccggagcgagtacactgctgacattttgttgcccctttccacctttatacaaagtcttctcgtacttttcagcctcggagatacaagccgtgtgactcttgtactcggtgccggcaaaggtggtcgagcagtctaatcaggacgggaattcaatcagcatcctcgcggctcgtttgtgacacccaattgtcatctgaactcacctaaacaggtaaaagttccccaacacctgttcctgtgcttgtcgagagcgggcttcttgaccgtgtcggcgcaattgtcacatctggtcaagcaagtcagtgggagaatcgtttgcgatggcacaacgccgctcggaccgtaagcttactggaaggagaccatcttgtgaataagcttgttgtagatggttttgtttgatacgctgttgattgtgatcagtcgagtcgaattgctagatatcggtctttacatgacggaaatgaatccgagcagcagctggttgaccgaaatttagtaaagatcaacatttgacaagttgggaaaagtggaaataacaataattaatgatgatgagaaaatcagagaaaaggtggaaataaggattacgaagagaacaactcttgccttcctccactcaacagcgatgagcatccacctccttggtgcatgggcagctcaaaagtcattttgcgaaacgtcacgaatgtcatttcgaaagtacataagttggcggaaaacaggtgtgcgtgtttgttttggtagttacagagatcgtatggcatatcaggtcgaacggggtcgaaaagcctcgaaaaaaatcgatgatgatgatgggggggatgagtgtgtgtacctctttctcactctctcactctctgtgcgttctctctctttctcttcttttgcaaggggggacaaggacgtcgttcttctcacggctccgccccattctgatcctacatccatccgatgtctctctctctacgtcgctcacacgtctctggacctagcgtgaaacgcttaggcctgagcgtcagcggtggtagggcactctcgggagatgtgtccgacctcgccacagttctgtgaaaatgagagggaaggtcatgtcaatactctgggtgggcgagacgtctagccgatcgctcgaaagacactcacgtagcacttcttgtcaccaccgtaagcgcctccgacacgctcctcagggcagtctcgctgggcgtgaccctcgttaccacagttgaagcacttcatagggggacgctcgacacgctcgttgctggaaggcgaaatgtcgacgtgtccgtcagcacgcagccattgactgtccgaatgacgacgatgtactcacgagcactcgttggccctgtggccgggctgctggcagttgtagcagacctgggacctggcctggttgcccctctgggaaggacaagcggcggccatgtgaccgaatccactacgaatcggacaaagatcaaatgctcgacgcggtcagcttttgcgcgcgattggatatcaagttatgagtcgttatttacccgcagttgtagcagttgccaccagcacggggagcaccgccgtagctggagacacctccctgggagcagtcacgggccatgtctatgagcgcgagcggatgtttagcgacgtgaacccgttctcgtgcgacgagaatgtcgagctgtgttattggactcacggccgggctgtccgcacttgtaacaagcaccggcaccggcagcaggggcacctccggcaccagcggtagggcagagggaagagatgtggccgggctgaccgcactattatacgcaagaaggggaggacccgatgagctcgtgcgaattcgggcgacgatccggacggggacgtaccgagtagcaggtcttaggggccttggggttggggcaggcgttggagatgtgtccgggctgtccgcactggtaacaagtgggagttccagtggtggggcaggcggcggcctggtgggaggctgagcggcaggcaatggtcaagtaaaatcagtgggacgggtcaacaagggttgttggaaggcctggctctgcaagacggtccagacgatttcggttcaaaggctgtgatctcgacgcccatgagcttgaccccgcaatcctcctccccttcctgcctctcccgacctgatcaacgtcccgactctccgcatcctccctcctctcgttgtaaattgcaagcaataacaagaagcgcaagttcattgactgatcaaccgatcaaggcgatcggcgatcagggaggatggttcataatcgatatcaaggagaccaagaggcaaaggtaggaaagaaaaggcaaggttacaggacgtcgttttcagctctctctctctctccgcacgcgcgctctctctcgtgcgtggtctcgtccatctcgtcccccccgtgaaagacaggggaggaacgacacggacgaagccagtactcgagactctcacatcatcatcctcatgctcatccttcgcgcgggtcgctcgctcgtcgcccccgttccccaaaccgaaatgtcccgagaccgtcccacatcgccgacgccacgtccagtctactcacggtctccacactatacatgagaattgtgcgtcagattttggttccgacgaatcaaaggggatcggggatcggggaggccatgatccgggactcacgttgtaacatccacgggaagcgtacatctttgatttgtcttgataagaaggttttgaaaagctattgttattccggccgacacgacgatcgtcgtttccgtaacgagagtaagaagaggtttcgttgccatcgtcgtaggaacgtcgaggtggtcgtcgatcgttcgagcggttatttcggtcgtaagagttggtgttgttgttgttgttgccattcgagttttcgtatttcgagcggccaggggcgagtccgaaagcgaagacggggcgagaggtcgagatggatcggaacggagaggcagcgatcaacatcgaggatgaagaaggggtagggagaggatggagcgtcgaggatgagacgattagtctgactgatcgtcccatcacgggaaaggatggcgaaggaaacttgtgcatacccctacgatgttccaaggacggtttattatgttccggtcaaaaaagcaaggcgtcaatcgagacgtgtccgaaaagcgcaaaggcgacgagtaggaatacgaagtttgtatgtcggtttccagaatcagtacgaggtcgtcctagcgtcgtggagaggatggctgtgagcttacggagatgaaggagaggttgtggaaaaggacaatcaagcagagttgcgggtgaggtggatcgatgtaggatcagaaacaggtcgacgaaggttgatatgcagagtctgacctgaccgaggaggagggaaagcggcggcgaaaaatcgagaatcgctgggagattggacgcggaagcgaaaaaaaggcagccaagggggtggcagcagcagcagaagatttgatgagagcggggcagaggacgcgcgcttagagagggagagatgatcaatctgttttctcacgcgtcggatcgaatcgagcatcacccgtgaatcaagtagtagatggcatgtttcatgtcgaaatcaatccaacgtcctgcatacaacgtcatgatgccattctatcaatacacctatgctacaatccccaatgacagaacacgtcagcccagagctccttgaaacccccgctcaagccccagaagaaaacgccaatcccagtcacccaatgaccgtaatgtacaacaagctcgagagacgacgcccaccaccgtctcgatcgaaatcgatcttggccgtcacagaccgctatttttgttcagaaacctctgcgagtcgcttggcgatagccttttgagcgacatgcactgcgtcaatgatctgctgtctgttcgtcggtttgacgagccactcgttcatgccgcatctgtgcgtgcaaacagagtgtcgtcagcgagagaggcagagaggggaagggggcgggtctgtgcctggcaagactgactcgttgagaccacgcgaccgatgctcttcactcgacagtgccgtcaccgcgacgatctgcgacggttggcgaccttgctccttttcgatcctacgcatttgaatggctatgcgggcgagtagacaaaacgaggcgtaagtgatcaaaaagaaggcagttccggaagagcgatccggctcacaagtctcgaatccgttcagcttcggcctgtagagaaaatgcacgactggtcagtttctcgtccttttttgagattatgatcaggaagcagacgtacatgttgatgtcgagcaggactgccgatacagcgatcgatcatcagcgatcttcagtccatttatccttgaatgacgatcgcgcagcttcgggctcaccaacgcatggtcccgtctcatccctgaactcgtccagcgcttgctctccgtccacggcttgatgtaccggccactttgaggagacaagatatgggttcagctcgcataaaatccgtgcggtttcgaacgggggctcacgttcttcttcaaatattgaactagaatcttccgattctgtagttaaaatacatgcggtgagaatctcgtcatattgcgacaagggcaagcaatagcgactaacgataggattatcctcgacgaccaggatcggggcggtggcgcccatgttcacaggtggactggctcgatgtttcaacgctggtcgcttttccgacgacattgacggttgcttcttcggttccttgattccgggactcttcgggtcctgcccgtctcggatttgacgacggcgagcgatcttttccttttccttgaacaacacgtcacgaagcaccgaagggatgatgggccgcttgaaacaccgcaaattgttttccgccgcgacggcttcaacctcttgacgcgagtcttccccaccaaagagcaaaacgagctcgccgtggggacacgtctcgcgaatgcggccaaagtcgattttgcgaccgatagagacgtttttcatgaccaggtcggctttcgcgagatcctgtgttatctcgcaaccgagacgctcggcggatctgcccaacgcctcccctgcgttcttcaggccaagcccgcggttgccgccgaaaaatcccgccagatacacctttttgctcggctggttctcatcgatgttgctggcaacgtggtccggatcacggggcttgatattggccgtgatggcgtgggtcattcgcctgcgcatgaggggaacctcgatgtggacggttgtgccctatcgtgagcacgcactcgcaagtgttagcgaagcttgaaaccggtcttcctcgaaacaggccctcggtactcaccatgccactttgtgagctgactgcgatgcttccgcccaaagtattgacgagccgctgggcaatatgtaccgatagaccactgccaggtttcaatgcattctccttcttcatcggacgaaagtagtggtattcgaggtactcgcgatccatgccgatcccgctatcttgaatttgtatgctgacatttttggtcagcgagaggtcggcatatccgctgggtggcaaaagactgggcacatcatcgacgatgatgtggacgaaacccttgggctgctcgatataagccagagcgttcgaaatgatgttgcccatagccctggtgatggacgaaaagaaaaggcgtcgacgtcagcaaaaaacaggttgatccctcggagtaacagagtccgaagacttacctggcaagattgccgttgcgatcctcttcgaccgtctcgccaaggaatggaggcacgatctccatgatgatttcgatctctggctgcttttcctcgtcctgtaaacgcgcgttggtatcggtcgagactagagcttcgacgaggtcggcgagcatgacttccagggttcgcgaagtgttttcctgttctaaatcccgtttggagatggcctggagcgactcctttgtctctcctccatcgccctggacctcgaagtagctgaggatgttgttggtgaccatctcgagtcgctgactggcgacttcgatgtctttgatggcggtgagcatggtcgagcgcgaggtgccgtcggtgagggccgagcggaggagggtggcgatgttcttgatttgatggatcggtgtccggagttcactgtaactcgtcgggtgatcagatcgagctcgttcaaggagcgtgttcaaccatactcactgagcctggactttggaaaatgtgctttgtgccttttccagcagcctcgctttgcggatcgtcatggcggctgagactccagcgacgatcccgcgtacgaaccgctccgtctcgtccatacgggcgggttggtggtcccatgcgatcaccaggatcttgaaaggactgccatcagaatgccagacggggagggccaggatccactgtgcgcccggtgcgacctctgccaagatttgagggtcatccgaatcggtaggaccacgctcatcgtaccagtactgatcgctgagtagcatcctgcggaggagcttggctacaccttcggaaaagacttcttcgtcctgattgaaaggcgagtggaaggaaatgtcggccactttggaggcgagtcgtctgggaccgaccgactggccgttctcgcgctttcgtcggattcgcttgaccaccaggtcgcgtgtcgtcgctccctgcaatgcgccaggtaccaggttggcgagtggtcgcacgtcgtagccactgttgagaaagggttcgtcctgatcgaccagcgcatggtgcagatcgttcttggcaccttcttcgcgcttgagaaagattcggtattgcgagacgtccaagaggacgacggcacagtcttcgatgacgtcgcagatggaacagatcgcatcgtcgtagctgatggttacgccgtggtgagtcgcagttcagccgccaagtctcggcccaacttacagctcagactcggaccgcttctcctcgccatcgtccggcatgaccatgaatccggcgtcgtaggttttcgacatggctgaaccgttttccgagccgggcgtctgaggtatcgagctgttggtcttttgcgatcggtcgactagcttgcctgtgggttcgttttcagactgctccgtgacaaacgtcatctgatccgacagggccgtgcggtgcaaaaagtcgatgatgactatgtgcgttggtccgagtcgaagccgatcgtttgatcagcttgaatggttggggatgggcgatcgccgaatcggactgacctttatatcctccaacctctctcatcgcccagccttcactctgttccgtgcagatcagcctgaccagcaagtcaccgagctgtcgtaacgtctcttcctcttcggcattgaagttgggtcgaggttcggtgtcgaggatgcatagggtacccagggtgatcaaatcttgcgggagatggcggtctttagaggacgacggcttgtatgtccggcggggcgatttcggagaggctgtaggtgaaggcgacggggatgtcgcacgggccgaacctggtggtgtggtcgaggtcggtgacgagcaccgggaaatggtaagcaaagcggactgctcggctcccaacggcgtgtcgtcccagtcatcgacatccgaatcggacgcctctcctggccatcggatgacgagcggtacggcggcgtaaaatctcagcctgtccttgtcctctttggtacctgcacgatcgtcgtcgtcgtagccgcctttgagacctcgtcgctgtacggcttgggagcaaagaagtcgtttccatacggtcatctgacggatctctttttctgtctggtccaggtcgcgatatatgatgggtcggggtcgggaagagttgatgatgtgagggcagaccgagttttcgctcgagaatttcgagtcggcaggctgcaaagagtcgaagtcaaggttacgattcggtgtgtgatcgagtggggaggtttgaaagaaagaagcatgacgatcagctcgcggccgtgtcgatgaatatgtggacgtcgacgcaccttgtcaccccgcatcccgatcatctcgacctcgtcccgcatgatcgagaccatggacaacttggtcccaaagacccgcttgaccacgctggtaaagtcgttgagcatatcccgatgcatgggcacgccctcgacgccgagacagaggtcttcgagggcggctcgacggcgcatcatggtcgaccgcgaggtcaagttggggggacgctgcgagttgacgggggaggtaggtgccgagcctggtttggaggtctggagagttgggttggaagaggacgacgactcggtgccgatgtagggcgagagaaagctcgaatggctcgtcattgttgggccttgtcgtgcgtagactcgggtcgatacggggacaggctggccgttcaccgacgccgaggtcgaggtcgagacggtgtccgtgtggtcctctatcggttgcgacatggcgaggtggttgtgcagcgtcaagatggctgccaccggattccaatgaagcccctccctcccacctcgttttgcccgtccggtccctcttcgttttctcggtctgtcgcgctttgcctattgttccggtatttatactattttaaatcgtcatatcacccatatcctttagtgagatggatgctacgggaaagtacaggcgtgaaaatcgttgcgtttgaatcgtggcaataacatgaacgaggtgatcgaacaggggatgagagagaatctatgacgtttcgctgtgaaaagcgtaggatttgagattcgctcgaaatgtgtctgtccgacccatgggagaaaagcacgcgatcgtgatagtattgcaagatgtgtgaaggcgattgaagaattcaacttgtgaaagaccgaaccggatcgcacgtttcatctagcgggatgcacatgcgtgtattttagtacgggagttgttcagcccatctcgagtttgacaacagagtcattgcctatctgataaaagaagatctcatcggacagaattccctcggcttgtggatggtcgctgttcgctcggtccgggtgtgtagactgggccggattgatcgttcatcatcagatatcagatatcaggtatcacccattcattatctccgaccggttccgagctagtcgattacgagagagtagcggaatgcctgtcaagcgcatgacccgcgccgtggagccaggggagacaggacgcgcgcttctaattgacttttcttgtcatatttgcgcgtcctctgatgtggagggaggtggcctgtcttgtctgccgaattcttgcctcattcgcgtgagctagcagacgcacaatgctagcccagcccatgctcacgggttctccgcccagcttgcctccctctccctctgcctttcctctctctgcctgcctccttcctcgtcggtcaccctaccacccactcactcgccttgctaccatcaccctccacagccaacccaggtcgacggcagggatccaaggtcgagctggaaattcaacctcacaaggtcttcagcgcacctactggacccgaccctgttcctcgaagctcttatccagactccagcactcaacgacctttcagcaaaaggttagatagtcttctctctctctcgtactcgaaaccggaacagatcgttgactcagggggaaactctcgacgtttttctctttcttcttgctttactttcatcttttctacatatttcgacgacccaacaatcgaccattctctaccgaccgacggaaccgcagatcagcaaagatggccgagcgaagcagtgggtatctcttctctattgtccgggttggttgctttcgggataccgagcggatgagtggaggagtacactggacgagtgcagcgaatgcatttcgatacaccctagaggagaggggaagcatggccgcgatcacatcggtggacaacgcaagaagagccgagatgaagaactcagggcgaaatgataactgtcatacaggaatgctgaccgtccgttctcccctcgtgctccgtcagacatgaggtacggtgccaacaccggtaggcccaccactgtcatccccagggcctccaagccttccaacaccaagggaaagcagacgtacgtcggccaaaaggcatcatgttgcatattcgggatcatgtcagaactgatcgatctgaccaatcactccggttctcctgctttatagcgagaagaaggtcttcgtcaggaacatcatccgagaggttgctggtttcgctccctacgagaagcgtatcatggagttgttgaggaactccaaggacaagaaggccaggaagctcaccaagaagagggtcagtccaggcttcgtacagatctgatcgatcccaaggacatctagctgatgttttgaacattcgggtggtacagctcggaactctcctccgatccaagcgaaagctcgaggagttgcaagccgtcatccaggagcagaggcgtcaagccggacactaaactcctcgtccctccctcatcggctttccactcttcctctccttccctcctttacgcctacccctcttctttacctcaccaatcaacacatgacccggaacttttcttgatgggaacaaaacaaacggaaaaaaaaacaactaaagatgcgaaggaagcgaagatcatcggaccctttcgactgccacagttctccctctgtatacaacaatgccattcaacccatctttcggattatgtctctctattgtcgccacttttcgtcatcaggttcatgggaacatggggatgatggggttcacggaccccgacatcttcgctcggaacctggagaatataagaggaacaatatacgggagagaaacgacggagattatgggctggattgacggatatggagatggtggacctaggcgggagatcggtcacgggggttagagcctccctttttccgacagaggtttttctaccggctgtttattcccagatggatttccgtgggtgatgtacgactatacgcttgacagtgcagtcccatgcagatggatacattacggcggtcattgacgtgtttgggagtcgcgtcagtgtggaggggatcttttcagcgtgttgattgtgcccttgctctatggtccatcgttgagagctctcggggctgttacgggtaagcgattcggcgcacatagaggctgttgcgaattggcattctgtcatgcaagtcgttgtgatccgcaccgtcagaaagaaatcgtgcagcttggcgcgtgatcagctttggagatttgggcgaggtttgcatgctaacaccctctgtgtttaaggaccacgacaatttgcgttttgcaagtgcacgacaaggcgctcagatagcgcagtcatccaacactgtctctctttgacagtgacatgcagtcagagtgatatctagtcggaatgacatttctttcgccttttacatgcccatcgccggtctagtgcactgagagcgtcgacaccgctatgactctggttcgttgggcggatagagttcgaagacggagaaaagggctggctctcgtcatctgctattgccagatagggcggctggtcgtttcgtcagacttggctggggagggataagaccccggaacaggtcgttgtatcgctttcagaatgtccagattggctcaggatccgtttgaatgagactgatttcgaggggaattgtgagtggcacagagtggtcctctgcccaggataggggtcgaatgggttgagttagagggctggttcctataatgcgcaagggagcaggatgttggcgaccgggtcacaacgagcttgcttcaggtaggcgccaccgattcttgacggcaggaatttggatacaagaaactaccgttcgtcgctacctgcggaacgaacaagcgtgcggagtgtgccgagcccattgcaaaggcgcaagatgaagaacacggctcgggcgatataacaacttgtgtctgggctcgaggactggctggaccttgcgcttgtagccgcatcgagaatcttcaagcaaagaccgacgtcttgtcgatggaaagtggtgcatgtaactcgacgacagttatatagaccgctctcattcggggcaatggctgaaagtgcgggcttttgtcaccctaaccgatcgcgggcagtcctcgccgcatccaactccttcctgagttcacggcacataggaaaatgtttgaagacgccttgaagccatttgttatcgatcctgtcgcgtgttcaagtataggccatttttgaagcccttgatatcccgtaagccaactgccgaagaaagtaacccaggtccatggcatattgcttcagctcttggctcttcttggccgatgaaggaaccaaatcaaccaagtccgtttgtagctggtctcccagatgaatgattattaagctaaagatggcaagatccgccgatgaacatcacaacctgcatgctaatttgcgaaccatcggaaggcgaggcaatcgacattagcgagattcatctcgatgttgactactcggtctcaggatcaatggaatatgctacaccatgatccgagctcacatgatccccgggatgctttcagcaatctcagcgggagggatgagttgagctcatgttcagcagcgttcttcgcatgaaaaaggccttgatccttatgatcactgtgtacaggtgaccttgagacctatctgacagccgggatttgcgagtttataaccttgccgcccgctttccctgcggcagtgagtgacatgcgagtgtggacgccgagtgtatggcgctcgatggaatcgcggaggtcgtgccattctaaacgcagccgtcctacacaataccttaaacgaattacaagcggacaccaggagaaaccgtggaaacgcgagccgtttcccctcggacataggtatggctaccgatgcactccgttcccgttgacctgtcgtccagactatcggagaagacagcacgattcctcgatgatatttatccgtcattccccatcccgcggtggatccacggtggttagtaacctgcgccacctccctcgatccgccagtggcgtttctcacgccatgcgatcacgccaagggacccgcgtgtcgtggcttgcgagcccgtgatgtcatcaaaatatggaacaggattgcaggacgatctgctcaagctgctcatgtttcaagaacctagcaccgtgtgcaaattgcactggccgcgaccgaaatgacggagcacggtaatcgtgagccgagggagatggccgtatcatgcggatcgaagatcgtcagctaagcgtgccagctagttgaaacaactcgcacgccggttctcgtcaagaacggcggaacaggaatcccgatctgtaataacgaaaccagggatttcatccggccgcgattatttgtatttgcgcgatggtagtcgacatgttttgcgcagcgaatcctttgtccacgatgacactctaacgacttgtgatatggtaatgccgatctgtccatctcaaatctctcttctcccgatcgtgattccagtctcggacgggcttgacccagggaccatgcccttggcatgaacgtatgccatcggcaaccgacatgggaacccagcttcatctttcttttcggtgaaagtctccctttacgtggcgtcgagatcgacgggcatgagggaacggtcacctcgtcaagcgaggtgaaccttcggaagttcggctcgatctggcgagcccgagttagatcgaagagtctcaggtcagtctccctcgcgcgtcgtcgacggtcgataccccttttctcgatcgatctcggtgcaagatggtcgaggcctggtcaagcggtttcaacggatcgatgacagtcagaaaagagatcgaagggtcctgaacgagcctcgatactggaatacgtattctcactttgtcagcttggtcgtccggctgcccgatctcgctgcgatggctttcgtagtcctcggtgccgtctgtctacgtcgtgatttaggcttccggaccacgcgccgatctgttccgctgtgccctggccgctcacccccccgccacccctcgctctcccgcgcggccctgccctgccctcgtctgccctcttgttcaactgttcttgctaagatcggacccttctctctcatcgctcgccttctctctctcgctctcatcgtctgcccgttcgatcgattgagatcgagaaatttaggaccgtcacatccctctcttgggatcgtccttctgggatcgtccttctgggatccctcaccctgtgacagccctcgctcgtcagttctaccccgcatcctgaggtcgccgcctgccgctctggaacctctgcccttttacgccttcctcgccaggattaatctcgaatatcgagatcgcaggacaggaatttgtattacgccccgaccataatcacaccgcctgcatccacacacccaatcaacgattgccctcgcaggccatacccccgatcttccggaatcctgaacccactctcggttcacaaggtctactccaagtcgccgtgtgcataaactctaggatcgggacctgacgcagtcatcctcgactttgcctcgacacgacctatcgtcctattctgcacagcaacccgggatcgactcttcttctcttttctcgatactttcacttgtcacagtctcgcctcgtctcggtatacacgcccaggtaattcgatcagcggaaagactttagggaatcctgccgatcgcgagacacaaggagcaaccacttgacgatctacctcggacgacaaactcttaacacccgacggtaatcgtactcgatcgaggcgattgtcacagggttgaagacaagatctacagtacaactactcggcctatcgcaacttgaaggcagaggcaaagtcgagatcggatggcttgatcgggggtgtatctcttgtcggtaagttgcatcaacctggacaccgtgaaaccaggtctcgatcgacttgtgttcacgtccgatcgcggacccggagatagccagactgatcatgaacaccttctctacctcgacaacccactgatacagtcaatcacttcaagtaaacgccgcctttcactctaccgaatcgattgatacccctcgacaacacaaatcactcaattcccccccccccatctctatccctcgatctcgatctacgttactccgattacaaatgtcggctctttcagatcgaccaaggacttcttctacatctacctctcccactacctctggattcaaccacatctctccccctgctttcgatcttcctgatcacggcctcggtcagcagttcgacaactcggcttccgatctcgcctccggcgttggtcactcgacatccatcgtacccatcaccccgtcttcagcagctcgtcggaaccgtccgatcgaagtcgatccgttggacacgacgaggcgggtcaactatcgtcccaccgcgctcccaatggatcatcaacgcaacgtcgatgacgatgctggcggggcgaggtggttgagcgaggacgaaggtggcgacactgtcaggcgggccagccgatcgggaagctttggggctgtcagcggcaggcgacccagggggaatgacattgcggccggacccccaagaggatcgggattgggattagggttcggacccggtgaaggtggcgagaatgcgaatcgactagaacgggatgcttggggcgtatctgattccagaggtcttcaaggaggcgcatcgacttcaggatcgggacccgttaccgaagagcagactcctcgatccggattggaacaagccaaagcgcattggaagtcggtgggatcatctcgaggtcgtctgaggcgcacagtcagtggcgggatcgccacttcacctacctcgacgaccggccagggtgtcgccacagaaacgagcgcttcgcaaggaatccccattcaaggacaacagcacgcggtcatcagtggtcacccggtcgcgccatcctctggtatcccaatgccagccctgcggacgttggcaccgccacctcgtgcatcggtcggtggagtctcgacatatcaggcctcagaagtacctgcagccgtggaatcgacaacgactgctgtcgcgtcgagctcgaagccaccttcgccaaaacgacatgcgatcgtggtggagcacgtcgactctgggttatctcgccactccagtgacgctgctgccgctctcgctttgtcatctctcgggatgggcgacctgccagactttgccgctggtcgagggggtgatggtttcggtggatcgggagcatctagcagttccaagactgctatcgaacacgtggaagagagtctcaggctgaaggaagccgagagacggaaacgcaagcagatcgtggccaagctgtccgacatattgaaatggtgagcatcaagttggtccccatcctccatttcccgcaactgatgatttttgccaccgaactatagcccatgctgtccgcccgattcaaaggaccagacgccgttcctcaaccaccctgtgaccctctattgcggtcacacattctcgtccagtcatgtacgggttcctcacgtacctcagccggacactacgggatactctcctgccgacgcttttgggatcctcgaagcatataacgcgagaaggctaatgctttggtccaaaataccgtgccctttgcccacttgctcccgacatgttggtcgatataggcatgctgcgcaatatcagggtgacgacgaacaacactcccggcacaacatcgaacacccagtctgtaacgcacagggtgtaacatattacccacccggcagcggagtccagctggaggagacagacgctggcatcgtccggtgtccacccccttcggatctgagcgggctgtcaaccgacaagagtcttatggatgtaactgttgccaaggtcctggctctggtgtggaagcaaatgaccgacgatactctcgaagatcgtcggctcgaatctttccgaccgtcgctcagccgttcagcatcatcggaaacagtagctacagagacagacgggcaggaagcagacgacgaagaggatgaagtggcgcaagccggatcgtccaagcggacccgacatgaagaactcgctcacgcgacgtctttcaaggatggatcggttgccacgcgcagtcctgccaaattgacgaggacctcttcaaaacgtcaacgacaatcaaccagctctgaacagtatccctcgcctcctcacaagcgagcaacccatctaccgtccagctccgattcggctcttggtcaagatcggccatccatcggtcgcaggaagggatcgatgtccttcgagaaggaactttgtgccgtcctcgaatgtgatgtttgtgcacagatactgcacaagccggtgacaacaccttgtcaacacgtgagtctcgattcggccatcttgccgaaagtccaccttcactaatcgcatctaccgtgcagactttctgttcttcttgtttggcgcgatcgctcgaccattcggcaaaatgcccgctatgccgacaggatctgccgagtgtcaactttttccaggatcatactgttaacaaggtgttgactgatatcggtaagcgcggtgcctgtcctgagaaatatagcaatttgagactgatcagcggttggacgacagtcatgaacgcgttccccgaagaatacgcagaacgccttcgggcggtcgacagcgaagggcgggatgcgcagctcgacactcccatctttgtctgcacgcttgccttccccgacatgcccactattctgcacgtctttgaaccgcgatatcgtctcatgcttcgacgatgcatcgagtcgggtactcctcgcttcgggatggtccttcctgctcgcggtgcaggaaacggcggtatcgcaggcgtcttggaatatggcacgatgctcgacattcgctcgattcagatgcttccagatggccgtagcatggtagaaacgatgggaagctatcgcttccgtttgctggaaaagggatcgttggacggttatactgtcggacgggtggaaaggtaggcataagacgaacgcgatgcgtcgagcaaccttagctaattaccaggcaattgtgcttttctcagaatcgaggatatcgcggttgaggatgaggtcgcgctcgaacagatgtcaatcgcccgcgcacgcgcacgtgccaacaacaccaacacatcggctggcagctctgtcgaacccgcagggtcgacttcttcgtcgcgcccgggcctcccccgctcgaacacctctgtggggcgccctggatccagtggaccaggcatggctaacctcgggcgggctcctattaacgaggcacacgagccttccacagtcgagctcatgggagtctgcacagactttatcgatcagctccggtcaggtagcgctccctggcttctgcagcggctgaacagcacgtatggacccatgcccgaggatgccagcaccttctcctattggatggctcttgtcatgccgattgacgaatatgagaaggctcgcctattgcccattcgatcgccacgcttgcgattgaaattgatcgttcattgggtggaacagttgcgatcttcctggtggtgggtcttccggtacatgcgcccgcgtacgacatcttctgacagcgcgtctccgcctccgtgaaccattcttttccgattgcaggttctcgagcgggtgagtttcgggctcatattgtgtcgaaatcttcctcgtcgctgattccgtccccctctattcttgcttgctcctcaatcaaggtgcgtcgtcggttgatccccgtccgccttgttcgccggaaaccttacaccaacatcgtgaaatcttccctataccgatcgctctcatagtgcacgacgacggactcgatgagggtcgctgcaccgtattcatgaccctttcattatcacgaccaagatgtagccctgagaccattctcatcagtacacgcgaacccaatgtagccccacgccgctgtatgctccgattctaaacataatgtatcgtgaccatcgacacagtctgagccctttgatgagcaaggcgtgctccattgtttccgggcattctcgacttgacgtgccagattatcgacaagatcgatctctcccaacatctaccgagagaatcgagaccgtctcaagcgacaagtcgaggatccatcatcaattacgcgtaacggagcgcgcgtgatcgagttttgcgtgatcgagctcctcgtaacagccctttcgttttttgacggggtccaattttcggagtggtcttagagggacaaaatcaagcttaaagggtgtgtggtacatgctactgtttggaattgtggatttccaagtcgccggattgaatttgagcactataagggcggttttgtcacgccccaatgtctctcccaggtcgtcacgttttagcgcgatgcccggttgtttgtttacaaagtgatccactgcagtaaccccctggggtatgagccggatgagtcgaccttgattcccgatcgacgatctcgctttctaaacatttgtcctgcctctcaatatcttggtgggctgaacggatcagcaggagaaacagggtcggattcggcgtcggcgtatctgaacagtctacagtaattgcctatataggagacatggcgtatcctttccttagccagtccttcttaggaccggtcagtgggccttcggcaatcgacctatccaatgaggtcgatgaccttttggatgacgacgaattagcgaatcgagaggtaacttttaacgctctggaaagtttgacaagttcgaccgctcactcttcagcctttcaggcgggttatacgtctcgcgacaacatcctcttctgcattgacggttccatggcaatgcaacgcccccttcccgattcgacgtcggaggacaccgagaataatgaagataacacagatgcggagggaagatctctagacactactggaaaggggaaaagtccgctacatatcgccttggaaagtgtcctaggcgtcatgcgaggcaagatcttgagcggccctagcgattatattggagtcttgatttataatatcgaggtcagtacctatgtgaacggtatcgccggtccaggagtcaaagtttactaaaaatgcctcccccatcgtagaggaaaccgctcctcacaccgcaagatgaacaggctggaaccattctcgataccaggcaacacggcatgacactctactttccccttcgtcagatcggtgccgacgagatcaagaagctcaaccagttcatcgaaggtcagttgcagagcaatttggaggatcgtgttattgttgccgatccattcctcgtcgcataaagaggccaaccttggactcgctgctcaggatgaggacgaacgctctcgagaacagcccagtatcatttccgatacttttcctcccgcccaccccggcgaggaggttgatgttgccgatgcactcgaaggttgtctccatgccttccgagatgcgtaagtcggtatcagagtgcaaaacggttgaagctcaagtttacgctcttttatgagtagcggtgccaagctgccaggaaacaaacggatcttcctcgtcacgaataatgatcacccagatcgcatccccacgcaggtcacctcttctgcgtcgaaccggatagacactcggggaccggcgaggacgagatatatggtcggttgaccttactgttggatctattgagatcatcactgacgacttgtatatttaggacttgttgtcgctaggcgtattggtcgaccccttctttatcagctcgacggaggagaccttcgatgacgacatctactggaatgtgagatttttggtagagactccccttgcctgccactgagactgtcttttccactgcatcaggacatcctgaaccgcgcaacagaagccgaagatgcatcacaggaaaatcccgccggacttccttcagtcaaggttggaggaggcgacggcttgactaagctgagagagttgctggaagaacaggttttccgaacaagctcgaagcgggtgctcttcagcgtgccgctgcgactaggaggcaaagatggtgacatcatgattagtgtcaacgggtcagtagccttcgacttgattatcatgccattcgacctacactgattctggtgcggtccaacaaatctaggtattcggtcatcgcagctacgaagaaacccgtcaccaagttgtacgacctctccggtcggcaacctgtcgaggcgaggagtcgaaccctgtatactgctacggtatgtcactttcaggttcgcccattcacgagattcgattcgacggctgtcacgaacaggctactggagaccgactggataccaatgaaatcggcttcgcatacagtttcggaaaatcggacgctcctactgttctggcgaatccaccttggcatcaacgcatgcgagaccactacgaggaacacggcgagcctgaagagcaggaaggaggggaagacaccgagggcgaggaagaagtggaggagaagcaggcgaagggtaaatccgctgtgacgcaccaaactcagacaagggtatgagcgattcgggcagagtcatcttgtataattgatgactcatctttacgtctctgtctcccttaaaaggtcgccctcacggcccgagatatcaaggagtacaagactttgggccttgatccacgtgagtcatttctgtggatatataattggacttgctgttcagacgatcgacttatacagagatcaagatcatcggtttcatgaatccgaaaaacgtgcggttcgagctcaatgtcaagaattcgattttcctttacccggacgaaagggttggtaccatgcatcgctgtggtggaccaagcagaatgatccaggctaaggagtgtccttccacagaccttttcaggaagtactcgaacgtttgcagccttactcggctcctgcctgtcacgaaacaagtgcgctctagcattcgcgtttacgcgaagaacatcaacaccatattatgctgctctaataccgcaggtgagcctctcagtgttttcgatcaaaaaccgcacctgcctgagttagtctgcacgaacagggtgaaagtacggcggacggtggaatgcatgcacctggcttccacatgattccgttaccattcgccgatgacttacgagctaaaccagagaaagtgccgaagagcatgcagatctgtacgtctctgagggtacgagcccagatcggatcactgacgacatcctgacacaggtacatcggagcaagccgaagcgatgggagctgtgatcaaaaagttgcgattgaaacaggctacttatgaacctcgcgcctacccaaaccctggtgagatgccagaaactcacgtagccgatctggattgttgataatggttgcgtgtacaggcctgaattacttttttgggcaactacaggcgttggcttttgaagaagaatttaagccggaaaaaatgtacgacaagacgaaacctttgttagatgggatgcatcaggtacgtcgttattgctctcgtgacccgcacaggcacattcgctgagaggaacaacatgatagcacggcgggaacgcaatgagagactataatcacctattggacctcgatgaacgagcggcgccaccaccgatcaaatcggaagttaccaaaatgaagcgagccaaagccgatgatgatctacctgaagtgaccgatgcatacatggaggaaagctggcgcacgggaaatatcaacaaggtgagaataatctggtgtacctgtgtgcgggattgaagcttagtgaagacgattttgattcagatgacggtgccgctcttgaagagttttgccaagagagtcggtatcgaaccgggagggaagacactgaaaggtgactggatccgacttgtctcggtgagttgccttggcacgagggtccgttttctggaggtctgacttcggccacctcgtacaggcgtactttgaatccgctaccgaagatgtgaaacccgccaaaaagcccagacttaaatgagcttcgacgggatcggtcgtgcatacaaccttgatataagctccctttcatcatctaccttgtgcccccgttgcgtctccaccctacaagcagtagctacatggaatctttcggagaatatacatagcgtctgtatcattctgatcccatcccgtcaggggctgttcggattgcaaacccagctaagataggggctcgttgaagcgatgacaaagaggtcacatcccgccagagatatcgccacgtacagccctgaaacctatcgcgaattatcgatccgatacagctcttccaatctcatgtacagagtattacattcgacgtcggtccgtctttcatcaaatctttgctcgcttggagtcatcacgtccaccctgatcatcgtacttgcgagccgagcccgatttgcctcgacgagaatggtccatcccgtacacaccatccggcgggggcgaattggagccttcgttcgacccatgctcctttttcttggcagggcctcgtcgtcgaacaaacgtcgcgtacatgcactgatcctcggtcccctttttgctgcaaggtccgcacgggtaaggagggtttccatcgcacttggacttgcgctgacggcacatgttgcaggagatggcctgacgatccccgacccggcctttgcgacccttgctattcggagtcatgctctcggacgaacgatcctgccttccctctacgtgaccgctatatcccgtcatgggggatgcgtccgtgcggaacgaattgtacccagtgccctgaggagtcgccatagccatgtagggcgattggtacgtatcgttggctgggactggagtggtaccaggaagctggtaagacctggaaaaagggtacagcgcgtgatataggtatcagtatactggctcgatagtgaagcgggccgaccgatgatcttcacctgtcttggccagcagaccattccccgtttcgagcgtaatctctcgcgtccctatcccatccatcataagcagcgtactcggcaatggtacgcgacccggggagatccacttgatcttccttggcaggcgaaggagccgggttgttgtctggaacaacgtctcacgatgaataccggattcgaacgcagttggagtcgaaacgattctccgcttaccggtcgtacgaagagaactggtcgggggtgccgtcgacatgttcaacgagactcgccctaagaccacgaagagatgacgaaaagcaaccagcttctatcagacctatgccatactgggaccatccgacggagggcagactcactggcacgttcttcctcgctgtacttgcctcgatattcccaagcctcttcgaatccggcacgataagccgcttgctcggcacccgtcgcgaaccggctcacgcccctgttcatgtactcttggtagccagggacgctcaacgagccagagtgctcggggttcctgtacccttctcgaggggactgaacggcgcggacgtccgactcggacggggtggctcgggcagggttgatagtgagggaaggtggagcgttgcgcaaaacttgcgggaggttcgatgtgggtccatcggcgggtcgagagtcaaaggaagaagcaggtcgggattgaccttgagggaccgtgccaggaggttgctggtagtacggctgctgttgctgttgttgctgctgctgctgctgctgctgttgttgttgctgagcatacgactcgcgccttcgatactcgtcctcgagcgagccaggcgtgttcccaccacctcccgcgccatcgttcggcctggcgaacggggacccttgaccctgataagatcctctcctcgcgtcatcttgcctcctcaactggttaggcagaggggaaacgtaggtcgacctctgggacgaggacgatccaccgacctgcgctccttgtccttgttgctgttgctgctgaccgttgctaccggcacccccgttgttgccgttgtaaccctcggggtaagcgcgtccgtccgaatttttctcggcgtccatgagactgttgattcccatcgcatcttgaccagaggatcgttgactctgttcccaaccataagcgctcaactttcgttcatcggatgccgcacgaagagcagggtcgatggcttcctcccaacgagcaggcgcgccgccgaggggttgttgattagagatcgaggggttgttcacgttgctgttgttgttgctgctgttattgttgctggtgttattgctgcctccgtatccggcgggaggacccatgtaaccgtgaccctgggtcgtacctcgaccgctctcaaagttgccgctcgcactcgctgcacctccttgcctgttttcggtgctggaaaggggtccgttgccgttttcacccgctcctcctgctccatccccaccacctccacgggtgggcctggtctgctgttgatcggccatcaaatctctacctagcgtcggggtcaacaaggaagagatcccaagaggaccgttgttgccaggggtggtcggggtggtagagtgactggtagggatagtgcctacggcagtacttatgtttccggaggtatgagagtcggtcgcgtctctttggttacgtccggtagatcttgatctcgatcgacgtgacgacgaggtgggaggggttgagcggttcaagatgggacttgtcggatgtcgagttgttgaaggtgatccgtagtgattgatgatatccatgagactaggtttaagtggataaggatgatgatctggtcgaggtagatgatcaagatgtcgctgacgatggtgagtaggatgcagtagtcgctgttcctcgactgagcagccaatggacgacggaggtaacggctgggcggctgaggagggggaacgcgcgtcaaggagcgtcaccactaccggatgatgatttgcagacgacgacgacgatggcggatgatatcgaacgccagcgatttgaccggccagatactcacgatgttgccgctgctgttccaaagacgacggcgatgtgatggacttgatggtcgagcgtgggcgacgggtcgacgacgacgtcgaaggtctttgcattttcctttcacgttgcgttgcttgcttccttccactctcggaatttgcgctcggatgcaatttttcaggttttccacttcgaaatggaccacacgcccgggtaggcgggatgggaagaggagggcggcgagggcgacggcggcgaagacagccaggcgcaaacgatgatgaagatgcttgcaaatcccagggtcgatatgcctcagactcgaggccgaatacgacaccgggtgaaggatcctcagacacttgatcagatggtcggtcttggtcccggtcagtcgtcttcaagtcgcgacagacgagaattcgaacgactcgcactggaatcgcgtcgtcgaaatcttgttgtcagcggccggcggtcaatgcaaaatctcgtcacttggtctctacaaccgaaaggccgtaaaggtgccgacgaacagcgtacctcgttgttgttaacccaactgtgaatctatatattattgtcgactgaggcgcaagaatacagacttgagcgacatttgatgaacggttggccatgatgataacattgcttctgcacctgatgctgtcctctgctcaccatgaggtaagaccgacctcgtatcttgcccaatctcactgatgtacgttaccctctttctcggaccgaacgaccaccccgcctcctcggctgagaacaccccgaacgtccccatctaccgtctcctccagggagttccatgtgcacatcgaagctgcaccctctcctccaggtctcgatctccctccaaagacgtattcacaatcacacggagcacggacattggacgtctcgatgctggatgccatatcgagaccatcagctcgcagctcgtgcaaggcggccacgggcagggacagaaaagcatccttcatcggaacctatcggacggcatcatttgcttccttgccgccgtttctcaggggcgaaggcgatgagccgagcgagacatgatgatgtgggtttgatcccgaccagtcaagccacgggatcaggaagcaggaagtaaatcatgggatcggggaataccgggagtatcatctcgtgtcgtgtcgtatcgccgcggctcgtcttcttcactccggcctgttccaacgatcttgcataagcaagacatcgttatgcggtcagtgcagcaggcacagcattcaattctactgacgggacgaaccaccttgtctacgcccgattgctgtttctagccttgtcgtcgaccattggagttcctgatttgctcaaagacgagcacgacgatagacaaggcctgagtggatttacagccgcctcggtgtcacggacttaaaaagcatccacctttcgaccgggaggggttgtctaccccaagccccgagcctttgttcgttctcatgatccccccggatcacgcatcggtccacccggaaatctttcaacaggcacggaagaacatggcatactgctgtttcagggacgttggagctgctcggaaggacggtttgaccggtcggcaaaaaggggaggcgtaatatatgatcccgtgatcgtcagcctccaagtgcagcgtcaaaacaggtccaagtcgtggggcgcaaacgtcggggaatttgcacaaaatctaatggaagggtacatcctctcgctcgcatcgagttatcgatctatgcagattcgtgagcaggcctattatacagatgtcatcgtccataattcgtagcattcgtcgagatcaatcgtggctacacgttggcaaggtcaagtctttgaggttcctgtgctcgtcaaagactccccagtgaggctcgactcctccaaagacctgtaagagtcgcggaatcgctcgtcagcatctcgaactactggcacggacaggaaactcacccgcttccaaggctcgtcaaaggcctcgactgaaacagagtcaaatgaaaattgaggagttgataactgcatatacaggtggtcgaaggtttggccaagcagactcacagaaaaagtaatgcgtcccgttggcattcgcttgacagacaaaagtgtccaagaaggtctgcaagttcgctgcgctggcctcggcaccgccgccgttactcgacgtgtttgcccagtcggaacctgtccaaaacgcattagacaggggtttaacagcgcgcaagtttatcgaatctaaccatgacggcttacccgtaggccatcccgtctcggcgatagcagtctctggcttgttcgatgctagttctgcaacggcctgcgtggtcacgatctttagctgaggttgggcgaatatacgagaaaatcgtatttaccacgtcgttctcttggtaaaagtcccaagtccaggtcgctgcgtccgcgatcgacaagttgccgaaccatctgtgtgttgcgcaaaatcacggtcaaaattcaatattcgagacgggactgttggatgggcccgttactgacggatgaactttttggaaccaagaagaaacgttaggttatgttctcgtggacgactttaccaagactggcgactgaccgttggcgtggaaataatcgattccctcggctagcgtttgcgtgaacacactaccagcatcgcttgttccatgaggtaatgtcttgttcaagcccagagcaccgatccgagctcgtacagtcgcaacatcattgacgatcttggggatccccgcaacgccattgctacgtatatcaggagggctcagtttatcattttcacaaacgaggcgccacgctgggctcacaagaggatgtattcgttaccgacggtgactccgagcacatgatccgccccatacgtcttcagagcgtcctcgatcgattccagctgactatcgaaagcgtccgtattcgagtcgacgtctgaaaagcacagggtgttggtgacgtctgcgatcgatcgcccatacaagcgaaggctactgacagatcgcgacatagacgctgaggtcgaccttggtatcctggatcgcctgcaagaccatggcagtctgattgcagttggctccatacagccggattcgagtggtcaattgagacaagatctgaatgtcacgcgtgacattggcttgtgtagcaccacatctgcatggcgattggcagttaggcgggaggtcagtgaatagcgaatctaaagcgtacttacgtgccatattgtacattctgcgcgacacacgagaagaccgatcagtagtgccttcaaagtcaatgaaccttagacgccctacctgaggggtgtaggcgaaggcccagctgcatgttctcgattcagcaagcgaaaacaaactaacgattcgggttcgttccatttggactcacaaactattatgcaaccttgaatccttatcaaacacacttgggtcagcccctatatccgccgacccatccgctgccgtcttgttcccatccccgctgctcgaacctccgctcttcctcccgaccgtgactccgacggcgatggcgacaatggcagcgatggcgagtatgatccctccgatgatccaccacttcttcttgctcttccccgcagaaccagcagcgtacccagcccctgaaccaactccgaatccggaagttgtggctccttgttcttgtctcgctgcgaacctcgctccgcttcgaccttggggatcataattggcatacgatgtcggttcggccgccccggccagaccacctcctgatctagctcctgctcctcctaccacaccgtaccctcccgcagcttctttgtcaaacgatgaagcgtaagagtcgcggtagttttcgcctccgatggatggacgagccattgggtctgatccagaataacgatactggtttgggatgtcggtaaaggaatgcgacggtgtgagattctgcgatagtcggtggggctacagaagataacagcgggtcgtgagcacaacacaggagcgataggatacaagactgggacctacggcagggacagcggaactgtcgtaaaagtcgttcagttctgcgtgatccgacgatcaaaaagccgaagggaaaagaggtcgatacggatcagcttttgtaccaaattcatggctgcttcgacccgatctgcggatatctttctcggccctcaacaagccgccactcgcaacagtcaggacgagacgtcctttgtgcgtttgtcccttgaccgccgcgattcggaagattggacccctcgatactcctctcacatcgcctggaatacgtcgatcacagtctcggcagactcaccgtggcgttctcctggtatggatgagtaaggcgtgttgtacgacatcttaggtcgggtatttcagggacttgatggagtcgtgatgggtcaaggtgatggttataggtgaaagatcgcaagaagcagaaagttgactgggcagcctgcggattgatgcggtctcgctcgggagcaggtgggcaagctattgactattggctgggcaatctgaagtgattatacacgagccgtcctctgctctcttgatgcttaatgcattaacaggcgataggtgcgatcgagaacgggagtgattgatctagttctgatcgttcttggcttttggctagctaaggcggtgcgagatgacctccactttggcagtcccttgttgataaatatgacaagcaattgatttcggcgccgctctctgcccccatcatggactcggatcggttctgcacaagcctccatcggatatgtattctcctgcactcttggtccgggagagtgctgtccctacacagtgcatactggccatcatctcgcacaaatgacatggacacggtccgggctgtgctcgaatcgaatcgctcttggcccgcatttagagacgaaattgctgtgctgtgctgctaacgccggatacaaaaatccggtagcaaaataacaacatcgtcggtggcgtagttgagtgacattctactatatcccaggaccgagacaacgtcagaaataggtcgtggttcggcacaggtttgtctttaagcgtttcacccagaccggggcgaggcgacaacgaagtgtttcgatgctacatggtgatccttcagactatcgatgtttcaatccaaatcgaattcaagcttcgaaaccgatagcccaagttcggcggtcgatcatggtcatctttctccactatacgccaggtcgctctgtggcattcttcttcctgattgcgaatgcactcgatgtctatcgaaggaaagattcacacgccggagagttgaaacgacgccgtagtggtagccatttcgtttgagcccctcgccttcctttgatctccctacctgcccaaacagcgcgttcgtactctgtctatgcttctcaaaccgtataaaaaggtccaaattcctgcgcatctctttatggaagtagttacttgtacatcgttgtcctccggatagaccgaacatcctattcaacctctcctgcctcctgattctgtacagacccgagaacatgtccgccactgaagtccgaatgatccccaagcgaacccagatcaatcaagatcgcgccgaagtcaaaggctctgagtggtaccctatcgatatcgatgccgaagaagatgcccaggacttcaagccttcgacggagatggccgtcctgactcccaacgcgaaggaagcgtccgcagagcctgtggacgtcgaactggaggccatcaccgttgatcttactagcggtatcgcccccgttgaagctgatgctcagaaggagtccgctaccagcgcgccctccgttgttcaaggtacgcctccctctcatctgcgcaccaagcgttaagcatgctcatcccgttacaacggagcataggcaaaggcgagcacttgcagccctcacccaaaccgtccaaagctcaggtcgacgaacaagctcaagcctctgcctcgtcttcgagcccagcttcatcaaagaaagctacgaccgaatccaagcccaagccgaggaaagtcaggaccgttcgattcgccgaggggaccacgctacccatcgtcgacgtcacccccgcggttgaaaagaagctcaagtctgatcctctcagcaagggccccgtccagttacttactgataccatgcaagttctcaaacggtacgacaatgagggtcgaggcgcagaggtcaaaacccatcagtgggaacagaagcgaatcatgctcaccatcgaagggatgtggaagtcggtcatctacgcgcaatgtgcggtcatgatgggcatgttgggcgtcatcttggcgatggtgttgaaagactgatgcgtgcaaatgcagtgatgtacaggcattagatcatgatatgcgcaggaggatgtcaatgcatgcaggcaaaagttcgaaacgggatacaaaaaaaacgttcaattgctaggtgggttacaaaggagaatgatcaaaatcgatgcaaaatgctaagggtgagttgagcaatgtcggaagtaaaatgttttgtttgtaaaatgccggtatatgatgcacaccaagccggtgcgcctcaaaagtttcgtcgcagtgatgtcttcctcttgatcttcttgatcttcttctcctgttccttccggctttcgtacgagccaccttcccactcttcaccctcgagaacgagctctcgagggggaaggcccgcttccacagcacctgggcttgaaatggcaaagactgggggtggtggtccagcgggaaccttcttggggaggcttcgataagctgatggaatcgatggtacgggaggaacagtatcctttgccgacttggccgccatgacacccttgagcaagagcgctcgaagcgacttgattgattcttgacgcttgggttcccgggagctagaagagctttgggtgttcatcccaggtcgcctggggggagttgcgggtttgtagaaaaaggattggctaaagtcgggctcgtcttgttccatggcttcgatctcgtcaatgttggtggtccagtggtactggtttggcgtactaggcgtcgccgcttgacgcggtctcgtggcccatttggcgtctcgatcgtgccagcctggtcgtggcgtcaatgtcggcgtcttggatgaagtatcgctaccttcttggtcgcactccatgtcttgagagaccttgcccatcatttgcaagctgagtttagtacgcagcgcgcggaatggcatgcctgcgggcgtgtctgacgtgctcgttgggaccggtggcaagtcttcgctttccatcgagtcgcagatgattgcgcctgccctgactactttgggtgaagcgggcagcctctgcgcggatgccaaagcggtcatcgctcgaggcatcatgggccgcatagcgctcttggtcgggccacgatggtcgtccttgctggtgttggtcatgacgctcgtacccgcgctccacattcgctgactaaatttgcccagccaactaccttgaccgggaaggacggggaccgatggtttgccgagaccgaccgcggtaaacttttgcacgttggccttgctcagaggggtgatttcgccggccaatgatggaaccgaatggaagagcggtgtcgacatcgcgtgacgaagtcctcgagcacgtacgactgaatctctactgcttcgagacgccaaggaggctggcgaatcgatgtctgctaagggagatccgcgcgggctagcttgcgcagtcttgttggttctaggagtcgatacggtgacatcggcgtctgcaaaggcgtcggcgatggtgtccagcctgggaatagactcgaaggtggagccgacgacttgttcgtcgatctcggtcttgccttcctcaacctcgatagcggcagaagcggcatactcctcgtggtatacatcgtcgtcggacgagtacatcccctcgacgtcgatcatgtccacgtcgtcgccatcctcataggcagccgggtcgaagcgctcgtcagaatcggatgcttggagaacgctctcaggatctgaaatggcgttgggcgtctcgctcggacgaatgggccgtccaaagagcacgccctggccctcctcccgaataacgacatcgatgaccgtttcgtcttcatcgacttctgagctcaaatcgctgaggctgtcaatgtcgacgcttcggaattccagatcgacccggttcaggacctttcgctttcgctcggtgccacccaccgagatctcgctcgtggcagcgtcgtgacgagtcggaccaccaagggcgggcatggactcgacggtttccttccacccgcgacccatctcttccgcctcggcccttcgttcgacttcgcgaatcttgatatcggcctcgctacgcatcttgcgcaaggtcaagacgtccatgtccatgtttggcaatggatccaacggcgcgacgggcaggactggcgggcggtattggtactggtgcatgtgcgggttggggaacggttgaccgtactgcagtgtcccagcagagagctgcggatgtaccgccggaggaggatacggcgctgagggagcgtacatcgggacctcgcccctagtccccggttgaccgggatatcctcttacccggggtgcgatgggcgggtagaacaaggtcccatcatctctccgaccaaacaactcttcgatgctgaccggtgtcattgttgccgtagtcatccgctcggaccctgcggctggactcgtcatgctttccacctgatcgtggaacaatccgatgggcgccgggtcaaacatgggtagccttgtcgccttgtacctcatggccggactaggcgtatcgtgcaccttgttctcggtcgagcacatcatgctcttcttggacccagacgtgggccccggggaagtctcttccaggctatcctcgatgtctgcccagtccataccctggagggcttctgctttacctcgctggatgacgtgttcgggtggggtcgcccgggcggactggatgatctcttggatggcttgaacgaccgggctcggttcttcgatcactgcagggacggtcgtcgacattgtggtggatttcgatttcgacggaccggccctggcgcttagggtggggacgacggcgggcgccgagcagatgcgtttttcaaccaccttgagctcttttctcaagttggaccgactgagcgcttgtcgtagcttttgttgttgagtggtggctactggtgccgagattgagccgtccattgttggcgcagggagcgggagtacgactacctgatgttgctgttgttgctgctgctggttgttccgcatctccactcgtcgattcaagagccctacatccaacctcaacctcttcccgccttcctccttgagacccgcctcgccgtcgatctgcgcccctgttgctcgatttcgcgatcccgtctcacgttccggggtgaacaccctggtctccttgtaccccgcttcgtacaacaagtgttccaggctttccaacccggcttggtccgtccgaccctgtaccagctcaaactcgtccacctgctcgtccgtcgggacctgtcgcagtggtcgtgctgttgccgctgccgttgccgctgcaaggtgccgagagtctgattcctctcgcgcgtaatcagaccgtacggctttcttgcggaggacgaccccgcccccaccgctcggatcggtgataaacaggttactccccgaatccgtcctcaaccctaatccgacgcccatccccggtagaccggaagggtgagaggattgatcgggatccctacgcaacgcctgagggtactttttcttcctcttctttccttcctcggcggtagcagcagcagcggtagcttcgggagcgtcggcgatggcatcaggatgagcgaccttgtgggtctgtgagctcgagctggcggtaggaagaggaggtacgggttgagatcgccatgagacgggtttatccctggtattcaacgcgccgtgtgatcgagcattccggagtcccttcctccccggttgccccggttgttgttgttgttgtggttgtcgctgttgctgttgctgttgctgttgttgttgttgttgttgttgctgctggccatgcgtctgcgctcgaagttgcccgacagagctcttcccctgtagacccctcccgccggccaattgaggtggctgctgatgttgttgttgagacagaaactcttgttgttgactcggcaaagccgaccccaccacccctgctcctcccgatccggtcccacccgccgccgtcgcctgaccgacgaccttggtggtccctcctcgatgagaattggaacgtgatctcgaattccctggacgtcgaccagtggaagaagagatgttctcttcgctcgagatctatctccccatacccgcacaggcgtatagacaagtaaaaaggcaagagggagggagaccggggaatggaccgggatagatgagatgagcgttccctttctcggcttttcgacccagggacgtaacgtacctttctcgtgatcgtccgcagaccctctcgtttcccctcttccacacggggatcggcatgaaggtgtgcgtggggatggagtcgtcgaccttggtcctgcgattgtgggggtgggggggcggtcatggtcatggtcatcctcgtcgagccttttcgagatggagagagaaagagtccagtccagggtgaggttaggttcgaagagggttaggggttgtaaatgagcgtgagggagccgtgtgggcgtatggaagggtatgaaggggtgatggtatctcgtccgtgccgtgttcaactagtggtaatcaagtacgagccaggatgtcagccatcagcaccgaatcgagcaggtaagtgtgaccgataagtcgtcccatcgatgggtctctcacctagttgcgacgaacgactggtgtagtcgagatcgggggggaggacacgcggggtctcgaaaacaaacaaataaacaacaccggatcgaaacgaacggtcgatgtccggggggattgtatcgggtgttgccagtgtatcgacttgtgtgtgacggtcgagatggcgatgatgacagtctacgctcacgactggtagtggtgcaagtacatgggtggtagagtgaattgaagctgaggtggtggcatggtggtgttggatgttgggtgttgatggttgaacgtgaatctaccgaattgtcctctctcccctgatccctctgggaatcaaaacaactcgaaagtggaacaacaagcgcgcgtgggcagtaggagattacgttagttgcgtcaccaacacgtaatatctcgtcaccgctggggttgctctctcttctttttctcttttcccacggttctctgatttcaaaagatgacgaagcgtagcaaggctagcaaggtcaaagtcgattcaaacatacagatcaaagtcgatcatatccatccattccccaaatcacatctagatttcatcaactctattacgcactcttacacaaaccactgcagaccatccacgatcatggtcaaactcaccatcaaaaccgtacagaacaaggtcagtccagccgcatctcggtcacgatcgatcggaacgctttcgagctgatttatccccccaaccccaacccctcaacaggtcttcaacgtcgaggctggcgagaacgaatccatcgccgatgtgaaaaacaagatcaaggaatcacaaggatttgccgtcgaggcgcaaaagatcatctatgccggtgagtccgaggcatggcaagggcgagacgagacgaggcgtgtcgagtcgagtcgaatcgagctgatcccggtacatcgttcgtaggcaaggtcttgggtgacgcgacgacggtgggacagcataatatcaaggaaaaagatttcctcgtcgtcatggtcaccaaggtgagtacccccgctggaggatatgcctcatgtgcacctgtcgtcgttcatagctgatagtttactacaccctcatacccacatggaaacgaccacaggctaaacccgtagcgaactcctctgctgcagcatcgacctctcaatccgcagctccctccacccccgccccggcagctccatcgaacgtcgccgttcatgcccatctcgatcccgcccatacccatcatgtccagcgtatccatatcccccatccccatccccatgcctcccatgaaatcatcgtcatcgccggtacctcccccgacgcctccggagcgggagggcgagtcgaggaaatcgttatccagggaataggggtcgtacgacgagtggtgcgagtggtgcgaggatgaaggcggggaggagagctcgatggggcctggtgattgtgccatggtcgtgtagctctgcaatgaggtcgctctttaggtcctaggacgaagggatgtgagagcttgagcaaggtgtcgcacgggagaagagaccgagtgtttgtcgattcggtctggactagtcgttgatgtcctgctccgtcgacggacataggagatcagcccgtgacacctggaacaacctcacacgtactacctaccttgctattatctatcggatggtcctgcttggtgaaatggccgagcacagtggaacgactgtaaacggtggtcgtggtggtcgttggtggtccgtgttgttgcccccggcgatgcgcgtgacgttggtcaagcgattctggtgtgggcgaggccggcggtcggtaagagtacagggccgggcgagggttaagaggagaagatgtcgagcgttctgatttaggtgactgagtgtgtatgtacaaggttacaaagtggtctagggtcggtgtagatgtttgttgattgttgtcgatgtgtgtgtgtgagtgggtgtgtggtgtgtgtggtccggtggtcccggtgaatcgctagctcgctcgttgactttggaaacgcgacggtggcgggtcaccgaggtcgcgacccggggcaaacagcaagcaggcgacgagcgagcgagcgacgataggcaaaatcagatcggatggatgatcgaacaatcgaaactcgaaggagatcacgaaatcacgaacgccccgagccgatggtatcaggttcaagtcacgtatagagggtagtccttacaccgtttgacagtctacgtaaaacggggctgattcgcctgtgcatgagcatgttttgattcagggcaaccgaccctgacgtggatgatcccagcatcttattaatttctttctcacgcgttcatttaatgtttacgtcactttttgcatccgaaggttgaacgggaatctatcccatctatcatagatcatggacaggttcaaagagaatcacaccagatcgatcaaatccttgacaaacagctcagacacacttatgaagtgaaaaggctactctgtgacttgggctcactctggtctagagcttcatctacgtagtccatttcattctccacatctagcctgtccacgttcgaccggccagcgccgatcatggccccgacctcgcactggctgatgaaggccgagcccgaaagccgcttggaaaagggcgtcgacgtcaaggtccgttcactgccatcgctcgttctccgtttaggccattccaataaccatcggggagacgattgacatgacgtacgattatggttaactttcccatagttctcgatcgatgatctgaaagcgatgaatgtttccccatgggacggagttcggaatcacgaagccaagaatatcatgaagacacgtatgaaaaccggggacaaggcatgtctgctcgttgatcttgattggcgagtgacccaatcagaccaaacagctgacaatatctcttgttcgtaatccgctaaggtcttgttctaccattcgaattgcaagacgcccggggtgtatggcacggcgacggtggacaaggaagggtacccagatcgtgagtcgcgaacttcctcccaacatcccgtcgagccgggttccaacttcttcacgctgattcatcctgcatggccccatcgctgatctcgatcgacatacgcgcagataccgcatgggacgagtaagccctcgtttcaaacccatgaccatcgagacagatctcgcgaacgtcctcttgcaccccatactcccagggctcatccatactatgacatcaagtccaaaaaggacaacccgacgtggttcatggcgagtcccattgaagaccgattgtcgccctcttccatgatcttatttgcgccacatcggccctgcccggacctttgacgtgtgcgcgatcggataggtggacgtcaagtacgaatcccacttggatcacccggtcaccttgtcgcttttcaagacgctagcttccggatcagacttgccggaatgtgtggaatatgttggacaaagcggatggagcgcgatcagggagatgccgttggtcaatcggggtagactgagtgagtggataccagccttgtccaagcagaagatgttccatataaagacagagcatgctgagggatatcgctatatctgccgatctgacggcaggtgttcagcccgtcagtcaagaagcgtatcaggcggtcctgctcctaggcgagcgaggggggtgggaatccctcgaaccgaaaaagcgcaagagttccttgaagcgacctttggagcaggcagatggaggggacagcgacgggacgaccggaatgggggaaaagaaaggtggtgctcgcaaaaagacgacgaggtcgggagtgaaaagggtcaggattagcgtagctggtgatgaggaggaggagagcgagctttctgacttgccggaagatcgagaacaggaacgccgagactccccaagcaaggtccctgaggtcaagaagaaaaagcccatcactccgaagagtgaaggtacgagaaggagttcgaggaagaattgatacaagacgggagtctacgttcgattttcgcattttacgttcagtctgtcatccgttcggtcagagagccagcatattgcacactataattttatactctctgcctcggcctcgagatggcgtaccttcttgcgaacaacatacgccttactgtgctcaagggcagcgcgagtcggaaacgaagatcccttgaggtaggacagggattcaagggtcctcaccaaatccatgaccaggacttgcacatcccaagaccctgaacgaagcatcttcagcattgtcacaggccatttctttgcagtcgctcttctcatacggacgtccaatagcgacaaaacctctcggacggaaagcacaaacaatcaagtgacaataacaagatagatacgggccttttggctatgtgtctagctactaattgtctaggtcgacgtgaatacaaggtttgacacgatttcggtcatgaccgactttatttcggcgacgcgtttcgatccaacaaagattggctcgcgaccgaacacctcttgtactctgggggctgggggtggggttccagatcaaacccattttcaatcgaaatctcgatgcgtcgacttgctcgtcttgcttgtccgccgattgagcgatccgacagaccgactcagaactccaatacatcgactaggtgaagcccgagatcggaaggggtgaatcgtcaatcatggagagtgaagacagcgacgccgtggtcggggaggaggtcttgattgactttgagactggcgggtgagtcgctctgccaaacgatcatcggctcatcaagaaattgagaacactcatctgacgtctttgtatggcatcgccgagcagagctgaggcgtcgaatggagccaatatgggatcacaatggagcgggaacgaaaccgacgctcgggaggggatgcgagggttgaaggccgagctggaaggtcagtctcatactgagcgatgtgatgaaggaaaccttgtccctcatcctgattcaggatactttatgcagaggataacaaagacccgtctaaattgacgatgagaaaggtcgtcgaacagctggatcagcagcagcaatactatgaagcaggtacgtgcggttctactgcatcgcagatcatcttgtatagatcctgatgcgtaccatctgacgatacatggctatcactaggcaagaacacagagaacagaattatggacgctggcaacctcctgttagtcggggacaatttcttcaggctcagtaaacaagcgagggcaaacgccaacgcgtttgatatcaacgattttctcgaaccgtgagtgtcctgcctgaccgcgatatcgatttcgtaacgctgaccagtcatcagacttcgaatgaggcttggattcgaccttccacctacggaagaagagggagaggataatgccggggggatacgaaaaaacggagagctaggcgattgggaaaagatcggctggatggcgacacggcgggccagaacggtcatgggtatggagagcatgtaagttcgacgagattgttcaggcatttcgggagagcagtaattcggaggggactgatgcgcacattgccaccgaatgtagcaacgggatgatggccgttgagcacaagaaacgcgtcgcgaagaagcgagccaagcaggtagctcttggtgcggaagtcaggccgaccgaattgaaggagcaagatatggctgcgagcaagaatgagacaacggaaaacgtcaggaatgtgagtcttgcgtgtaaatatttgatccacattgtctgaccttcccgatgtcacaggtatacagacggcttcaggtatatgagaaggacgaggcgccggacgcctacgaaggggtcaacttttacgaatggatcatcaatcctgacagcttctctgaaagcgtcgaaaacctgttttatacctcttttttgattcgcgagggcaaactcgccgtcaacgtcgacgagcaaggggtacctcgaatgtgtacgtcggcggtatttgagaatcaagcagatggaacgatagcttatgttgactcccatccgatgtacagacgatgctgtagatggagacaatggcgatcctgttccaaacacagcgccaaagatccaggaggtcctgcaatttgacatggacacgtggaaggtgaatggtctaaagctgaccattccatcactacactaacacccctttcctcggatcgcatcgttctagcaagccataaaattatttaatatcaagaagcccctaattccgtctcgaggagctgtcaacgtgacgaaagactcttgggcaccggcatagcgtaatggacagatgtctatcacgaaacatgggcaatatgcgaataccccttcggcacttaattctgagcagcacaggcattctctcgccctgttgtacgagcatcgatacccccaaggcatatacatctttgaattcggagcaaatgtgtgtgtatgcataaggtcctgtcgagcatgctgctctcgttccaactgtaatacagcaatggcaggtattgtacgatacatttcgtctcattccgtctctcaagttaagccctattcagcctgtagcttgtttccgttcttcctcgtcttctcgatgaccacgttcgatcaaaacactttctggcgtctttgtaatctgggcatttgtagccgcttgattgaggttctttgatgcagcttttacacgattcctggggacagatttgacagtcgtctttttgcctgccgtcgttgctttgcgtgttctccgctcagcgatgattgcggccaggtcaacattcaaggcatgatctgattggtcttcgtaatcatggttcggtctgatcgacaagtcgcttttcgaggccaggtaagccaaggcaccgctagtaccccgcgacgcttgagcctcaagatatgccagatgatccttcgagctcaagtcgccaaaaaaggtggtttgcggctcagtcccatcaacgccgggatgatctaatctgttcggatcttcctgtcccagcttgccccgagtcagctccagcaatcgcatgatgtccaccgattcaccaggagggagagactcaggctgagatggtgtcacgcaagtcatgtcgacttctttgcggaagatgttatcaatgtcgaccagcgagaagaaggcgaccccctgaggaaggtcattcatgcctagattatagcagaataacgccctagtccatacgttggcgatctgtagagcgagtgcggtgcggtacgtgtcgtgctccttcaccatataccttaattcgtcgtggacagatatcatataccgagcctggatcgaataccgtcggatcaagtagtccatcgacacgatgagaagatggagatagtcgacacctgatgactgtacgacccaattgatccttgaagggagataatctccttggcccgtaaatccgtcggacagatattttctccgaagagcatcagtgacgccgcaaccgagggccggcgtacgaggtgtaatgctgcttgcaacggtctccagcgtgttgaagagatagctctccgaacctccatgccaaatcgagcgaggcccagagtgcttgcgaggtcccttctttcgggcatccctggcgaatgtcttgacacccttggtcgaatgatatagcgcttgagcaagttcttccgcctgggtagggtctagtgtaggatcgttttgcaacagcagctggatggcatgcttcatacccgccccgtaaatacgtgaatagttgaagacttttgcattgtcacgtttcgttttgaggatcttggccgtctttgagtgcaagtctgtccctgcagatttggttccttctagggtcatccaaccgatcgcagatgcgccatgcatggcgaactgagcatcgcccatgacactggcgatccagagctcttccgaatccacatctgcgccgacaattgcgtatccgggaggagctcgaatcattgccttgacctctgaaccgactcgattcttcttggcatttgaagcggtcaaccacgtggactccatggctcgccgggtgaccgtccccatggtcagcacttgaggcaatatcatgcctagatcaccagcttgttcgacatcggtagggaggcccaaacccccaacgtcattgtggtacacgtccatttgttgacagatcctttcccgagcgcttatccagtaactgcattgagcgttcatactgacagcatcggctgcagcgttggcgatctcgtcgtcccccagtcttgtcgcagcggaagaggccaagtcgccgctctcaacgtagcgcataaagtttttgctcaaggggttgccgacgttggcttcttcccctgaagcgtgcggaagcttgcagtaaacgccatcgagatcgtgctgaaacttgggatctgttacctctgccttgatcagatgtctgttttggtccacctcttgtttgggaacacggaaaacccatccggtgctcggactgtgatgaagcgggaagcccttccactgtaggcgcagtaatgtgggcacgacccgtttcttgaccgtcagatcgagttcgccagcggctagtcccttgcttggaggcggggccaggtcatggaaccatttcggccacatcttggacttgtcaatgagtttctttggcgaagcgctcgatcgaagtttcttgagttgtgcaccaatagtgctaccggaggtagatgccgtcacagcactccgagccggtcgctcgaccgattcccagagcaagtttcgcgcccagaccgtctctggtcccgcgtcgacaaagtctgcgacggcggtgcgaatctcgtcctgcagctcgattctgtctatcgaacgactcaaggcgtcggtgagtttgggatgtgccgacgcgagcagaccagaagtccacaactttttcgagcgtttcgcaaagaccgagctgactcgaggagatccagccgggcccagcttgaaaaagtcgtacttgtccgactgttccagcaacgacttgtcctccttgacccgagccagctcgagtggtccctcgtaattgtccctcttgagtatgtcagactcggccttgggaacttgtactacccagcgatgctcggccgactccactacaggaaaccccttgaaatttacccgagcgattaggggtagagggtctccaagggcgtttgtaggcaaggctttgagcatggtctcggaatctcgcagccaacgaggaacccggttgtgtccgcttaagaatcggaaagcatcgtcggccgggggtgagacttgttcggcgggtcttgtctctgatgtgatgagcggagacgcatcttgctctttgtccaccttgacaatcacgggcgtctcctttagagagtcgaccgcagcgacagccgtctcggccggagcatcctccgattcaccttcgtgctgattcgcctcttgtggtcgaccccgcacctcgtcgtcatcccatcgcggcgccttgagcgtccaatccagctgatcgctccaaggatctccttccaccggtcctcgctcctttaacctgtacgcaagttcccacaggatccctttgataccaccttcgagctgcctgtacttggtctcggctcggtggatgtactgtttccacgccttgttgatcggcaagaacgggttacccatgcccagggctccggcaaacgaggctggatgaggacacgagtcgagaaacagtgggagcgtctttcgaagaacggcgtgcgtgaccctgacgtcttccccacagtaagccaacaaggtctgtagttcgggtctgagctgactggccgatcggatcgactcgtctccgaacctggatcgaaccgtcttgtccatcttgccgccgtaatgcaatcgatagacttcggcgagcgagttggctgacgtcacatcctcccagctcttttgttcggccacttcgggttcggcatcgatggccgccgagggcgagtcgccgatatccctgatcaactgatccgtctcctcgcccatctcttgttcctgcttcagtcgcttcctccgcttcatccatagtccacgctgggtcgaggtcatgcccttggtagccacatgaaggctcagcgtgtcgagccatcgattgttggacaggtcgatatggtactcgtccttgacccgagctcgatcgtacccgacattgtgtccaacgaccagggccggctcggacgcttgactcttggtcaatgggatcaagtctctggggacgtccttccgggtctcatccttgcccaagtcgacgtccgaccggtcttgctcaaagatggccgggctcaaccaagagtaccaatgcgtcggcgtcgccgcggtggccatgacggggaacggcgagatcttgtacaacacctcgacgtcgaaacagatcatcttctcgccccctaggtctggtacatgggtcgtcgagccgtccctttcgtaccgggtccaccctggacctattgtgttccacgtggtaggcatgtccgggatctcgctctcggcaaacgtcctcgacaatcccaaaaagggctgagcggcggcttctcctagcttgtaaaagtgatcccgaatgttcaccccctgaagaggtggcaagttgaaatcgatctcggggagtaccgccgctccctcggggaagagctcgttgtccgccaagtgtctgagtgagatgtcgatcacggcctgtggtggtcccgggggaggttctccagggaaaatctgggattggaggtgaggcgagaggagttgcacgcccgcagcgtttctccgtagtttggaggtctttgtcgaggcgggtattgatgcagcgggattgtcgctagcagccgaggaaggatccgtgggcggggtggaactgtagacggacgaagaccagacggatcagtcgagatcagtcggaccttcggccatgactcacttggaggcgccgaccggtggatcgtcttgccgactttcctcgactcccgtcctatgttgatctgtcaccccaatagaggtggtctttgcctggttcaccggatcctgctccgggtcgattatggtcctcttgacccgccttttaaacgaagaaggatcgtcgacggtcggcaacctgatcttcttacctggatctcgtacgtagtcgatgggcgatgaaattcgagaccaaaatcaagagtcagcattcctgctactcgtcgtctgtctccgcttgatccatgggacgagactccgggagagctccaagactcacctacctcgccggccatggcgtccaacccgtcctgaaactctcgacgaatcttttcccggggttccatctgcgagagcgtctggatcatgacggcttcatcgtaatcccgtctctccccggctcgggctcgattgtggaccgtaggtcgtccgagcttcttggtcgacgaggtctggtttgttgacgatgacgatgtgctatcgaccaatcggtatccacttcggtgtagagtgggcgtcgtactgaaagcaaacgacgagggaatcgatgccgcccgagtagaccgtgtgaaaggactgcttgatgaccatgatttcgtcaagcttgacgattttgatggtcggagagaccttgcgactagcattcgaggggtggccagatcaccgggggggaacacgagcgtcctataactcgacgatcgaggatggtcgtcctaatggctaaatgattattattatggacggtatgaatatgtgattgattataaggatttgggaagtcgtgatctaggagagtggtgttggcgacgagtcgacgttgagcgttcgtgatgatcgttgtgatacggtttcgagcttgcacccaaattcgccaaagtgacgaattccgagttgaagtggagttgaacctgatctgatctgatctgatctgatctgatctgatctgaatctcgcgtttggtacttttatttctcaacaacgcgacaacgcgagtgaacaattgcttcaataatttattagtgtgtgtgtgcgtgttagctagcctttgaacccttttgcccattgacgcgtctctctctctttacctaccttggcctggctcgcttgcttgcttgctttcgttacaaagtcgcgtctcgttcaaacaaaccaaacccaaaccatccccaagccatgccatgtcaagcaagaagtaaattcaacctgtcaacatctatagctacctctagcctacagctacatcagacttgaccccgaattctacctacacacattacaacacgcgtcaatatgccacctaaatcaaagacatcggcggcaccggcggctgccaacccttcgtgggaagagatggagaacaagaggaaagaggtcagtcatttcagcgcggtcggtcaaccattccacatctgcacgaacccgtcctcatttcaagcccccaactcttctttccatctatccaccacgtgtcacctcgatgcaccctccacctcgaatcccgaacggacggacggacctaccccgccagatggtcaaatccctgcaagccctgtccgaggccatgaagacctgcgcccatatcctcgaagactacgtctcgctctccccggagaacattgccgataccaacgaaaagaagcgcaaggccgagcaggacgccgccgacgccgccgaggggaacggcaaggccgggaaacgggcaaagaaggagaagaagatcaaggatcccaacgaacccaaacgaccgccctcggcttacctggcttaccagaacgccgtcagggaggatttgaaaaaggcgcagccggacatgccgtatgcggcgttgatgggccagatcgctgaaaagtggaagttgatgacggccgaggagaagcaggtcagtttcgagggcagggcaccgttcgcaggtgggaacgggaataggaagagacaaagctcatcctcgacccccgaggggattcatctgtttcgtacctcagccttaccaagatcgatacgatcaattgtcgggcgaatggaagtcgaacaagactcaatatgccgccgtgagtgggatcgtatcgtcgcgtcgaccgcacccgactgacgagctcgtcgtcatctccgctcactcccggtgaaccagggcaaggccgctactgccgtgagtctcgacatgctcgttgccatccgttgaagaccgaacggcgcacccagctgacacgcacatgaccatcatctcctcgtacacaggctgccgacgaagccgccgctgccaaacccctcgataccgcctcgaccgtcgccggatccgattccagcgactctgacgattccgagtcggaaaagaccgaggacgatgatgacgacgattcggacgattccgaggacgactcgaacgacgagcccgccgtccccgcaccggtcgctgcacccgccgccgccgccaagaagggtgggaaaaagaccgccgccgcacctgccaccccggctcctgccccttcgaccccgagcaaggccccagctagcaaaaaggagtcggccaaggagaaaaaggagaagaaatcgacaaaggctgtcgtccctaccccggaaaaggccgaaaaggtcaagaaaccaaagtcgtcgaaaaagacggcctgatcccggaggattaccttgcatacgacctttgcgttcgtcttttcgctcctccttccaccatctatcgagcgaggtctgcccatgcggtccgcctgctatacacccacacttcgtttcattcttcgctcaagcatgactttattggccatcgttaccatgcgcctccccttcttgtcttggctcggtccgaacgtccttgtagtggacccacaatcatgacggaaatcaatgtgcatttgactgcgcactatggccccgctcgttgatcggcatttgatcgacccgcgaagagattcacgccaacctccatgtatcgtatgcatatgtatgggtctactgtttgaagacatcggttctcgacatgcgttttgacattcatagtccctctacttgctcctccttctaatcgtccatcgagccacgaataggcgctcccttgatcacttcttactgtccccgttggtcacgctcgcctcgtcttccttggcccaagcctcccgtctagcggcgatctcggaaaagtccttgaagtcaaacgcgagcggcatgttcttcctcacggcggcgaggaatgccgacctggcctcgtccgtgctcttcaacggggagacaaagaatgccagggcctgcttgtagatggcaaggtcgggctgcacttcgggtgagacgatctgcatcagcgtttcctcgacttgacgcttgtcatccgcggtcagttccgtttgcccctcggtcgcctggacagaaaggataaagtagagcgacttggctgccgcaaacagatgccgagcctctcggttcttctgcagatagtccgagttgattcgagaaggtgcatagtcgtcgggaatcacagtcgcaagctcggctcgagccatctcttgtagaccatgtgatgcgtccgccagcatcttcttgttagcatcgttgccaactgtgacatccagaaaggtcagtagagagacacggcggtcgatcgcgtgctatccgtgaaactcacggaacgtggccaacgcgatgcgctggtcgtgcactttgggatggtccggcgccagattgaatgaacgcttcagtgccatctgagcacgaagatattgctctaagcaggatgaagcgttagcacagaattagccgaagaacaggccatgaacaacgaactcttcctcattgcgagttcaaactcggccaaccatgattccaatacgggcgtgtcccgcatcccttgtaccagccgttccatcgctcgcagaggatccacttctttgagatagtcggccccggcaggatcagaatcgggcaacgaaggctcttccttttcctttttggggtcagcgggagcagtcgcagcagctgacaagtatgggagggtcagaacgataggctgagcctaggttgcgtgccctgactcacctttcttggccttgctgccggccttttgtgcctttttggccgcttttttcctctcagcctcctcctctggacctgagtagaacacatcaaggagggcatcagtgggtgaagtgtggagcaaggcagatccatatgcgacttactcagtttgacctcgcgcaacgaagggtcgtcctggatcatggcatacacctcgcaagccgaagctgatgcccgcgtgaaccacggacttgaacggaagttcttgtcaaacttgagcatcctgtttaggcttgtgcattagcagcatgcaccgcgcgtctacacgatgaaactgactctttatatgcgttcagggtcaactttcgcaaagagtaggtatggaagtcatattcgtcgtcctcgaactcttgatagatctgtggatcagttgtaaaccattagccatgggccaattccagcctgcgaacagtgatgactcactgcaatgacctgctcgtatcgtttcacggcaagaggcaagttgccagcccgtcggtaggcgtctccctcctcgatcaggtaccagctgcactgcatatccttcaagtcggctccaggtgaaggagcatctttctgcatttggccacagaccgatgcaagtaccattagcatagaggatcgcatctcagtcatgtccggacggaccttggtgaaaagcccaaagacctgcccagccttttcgatctggccagctcgtagccagtacttccccgactttccattgaggaatcgatcgctcttgtccagtagtctcgcctgttctaaagccctcgccgctccttccaaatcacctgctcgcttgagcacatgaccccgggcgaacaagacctcgggaacgctagggtgccgttttccggccaggtcgagcagctccagagccctgacatagtccttctgcggacaagtcctgtgggagatgctagacgcgatgaagtagtatgtccagagaagtgcttccgagtctgaggagcggaaggttagttttcacaatgttaccgaatctcgcacccggatgctgaccctcgtccttcgcctcgtattgctctttgaactcttccgcaaccgattgtatgattctctgcttctcgtccaccagacacagccctttcaggtcggagaacagcgatggaatgcccttctcgagagccttctgcatgtaaggcttgacccgagatcggaactcgtcacctagcatcgagaacgatcatcaattagtaacggcctttccgacgacggtagatgaccgctacgactgaccgctgacaatatcgagaatgagacgcctcggtgcagaagccctggggtagctctcagcgaagccgtccatgattgtcagagctttgggcagcagctcgtcgggtattgtcgaatctgcaaggcagacggtcagtccagattgcgctatggccgttcaagccgttgatttcagacgcaccaaagtcgattcccttcaggtacatcaagttgccgtagtacgccacattgtccgggttgagctcgatcagttttctgtactgctcttcagccttgtccttctggccgagcttcttatagatcgttgctgcgagggttttgatagcggatcagcggactatgactcaagcaatttgtttgacctgaactcaagctcaccctccaaactcatgacgtcagaaatgggcggcagtgtcttgtcgtccacatcttttcgcagcatctccagagccccctcgtactggccgacttcgaccatcagctgaatgatgtgcatagagagctcggccttttccaccgagtcatacccagtttcctaaattcagcaaatgatgtaatgtcagctggattgacttcgtgcatgatcatatctgactcgcctttaatgccttcctaaggttgtcgtagacattcagtgcctgttcaggctcgccgcacagttcataaccgatggcaagcgtaacccagttggccttcatgttcggtcgtagagcatggtacttgatccgagcctcctgagcctccttgtagaacttgagctgagtatagagcgagatgctatctctgatcaacgggatattctcagggtcgatagcacgagctctacggagagcatcggcagctccagcaaagtccttgtcggcgcgaaggatgatcgagtggacatgatgggtgatgtgggaatagggatcttttcgcaaggcggtagcgatcagacgatcggcctcttctcccttgggttgagacgtggccgtaggatggttgtgaggcagagaagagtggataacgagcgacttgatagcgagagtttcttttcgggtacggtcgacagcatagtgagctacgaagcttgcttttgctgatcatagcatgactcaccaccgtggttggggaactttttcagaatttggtcagcagccttgataccctgcttgtgctgcttcgcttcgtagtgttgctggcagttgatgaaggtaagcgataatgttttgtcgaacaaagctatttaacatctccgacgtgcgaccctgacgtactagtagctgcctgaagagacccgactctttagccggcaggacgcggtccttgatggccttggcctgagcggcactgtcagattttgcggccattttgttgtgcttgtcccgttatgctctggaactgaacctgagggtttgaaggtgcaatgacggttgtagttattaccagcacgaggaggaatgacgagctcaattcattccagctctgagctcgcacagctgatgtcgatcgaagtaatcggtctcgggcggtatcaactcggcgcgcttatccgcggaacgcgcttcaattccagaaatcgaccacaactacaacgatcaccgtaatcttatcgtatagacatgtgtactcgtacatgcaccctttaatcgttacaggtgcttattgcaacaactcgttaaacagggtaggtcgccgacaccagctgaaaacggtgtaacactccccacagcgttgtgagaagtgctcatcttcttacatcgcattcggctttacatcgtcgacacaatgtctttctatgggtgtctgaaccgacgatggttcactttgtagcagctcatagtcgtttctactactagctccgggtgtgacctcgtcgtgattcaacgcaaaccatacggtcccagctgcaagaccaatcgcgccgaaccaaacagcaaggcgtctcagcgcccctcccgaggcggagaaggagaacaaggcgctatcgaacagaggcgtggtaagcaaagaatgacgtggctcaaatgtagcatttacccaccctacgatgatcggcggtaaccctcgaccaaatccctattcgcgccgtccaaattcagtacttcagtacctgtcaacgatggtcgtccgccactctgactcactgcgattgaaaacaccatagagtatgcgtatggaagctgcgctgcgcgctcgacacagtctggaaccgaagcctcgataaatctgaccaggttgaggcgtttcagcgatcttcctactcgaggaagacgcaagagcagaacagccttacgttacacccacatcgccgtatcgtttgcaaagggttgagatgactatccagaaccagatggctccctgatttagctctgcttcctttccagcttctacgttcgaaatccagcttatgatccccaaggttgcaaaagtcaaggcccacgaaatacaggtgcttcctaggatcatcttgcgcgacaagttcttctccatccatgggaagatggtgatggcgcttatgcccccgacgatggcgcctcctagcaagacattactcaattcaggtggcatcattccaggaccgatcggaggtgcagatgcgcatactacgaggaataccacgtccgcgctgaaactgttcgcacacgttactagtgtccaatacgtttacaatcagctcgatcgccgggcgatgggattcagtcagatgcagcttacgaaattcgaggatcaacatgttacggcaaggtgaatatcgccaaagattgatagattcctcccacattcccgcttgcttggggccggcagacgaggtgttcccccactttttgcgcttgtctttaggaagggtctaaagggtaaaagacggatggcatcaggtcgactggcgttcttagaaggaggtaaaggaatgacagatgccctcgaatttacctcgggcaggtatatcaatacgattaccgctatgaccaggatactggacctcggtttcctcagtcagcggaaaacgcgttgtacatcaaatcgctttgcacttaccagactccgacgaacagacttggcgccaagtacggataatggttgatccatccgacctccgaaaaagcttcaaacctatcgagcttggacatatggccaccaatccagggctactggagaccagggcgctgagctattccatgctagacgtgtatgcgctgcgacaattactcactcctatcacgtacccgaccgcgaacgcgaagaacatgatgccgaacgctggaagatgatttctgacaggcatgagctcagtcgttgaggcaagtgaaaacgcctacttacctcttccacggttggtgtgatcacagatttctgccatgattccctttgtcatgacggcgtaagcggagcagaatccttgcatcgtcctaaaaaagaagaccccgcccagagtcgtgctgaaaccgatcgggatgagtacccacccgtagagtagcatcgagaggacgaaaatgggtttccttcccgtatagtctgagacgtagcacaggatcggtgccgcgatctcggcgatttggaggcacgattcgatgattcccacccagaaaccgagcgaggctgcaggaacgccgaacgaggccacttgatcgctgacgtacgggtggatgaccgtccaactgatggcgagtgcaaaccgcgaagcgacgagggggactagaaatcggtaagggattggtgccatcgtgaagagaacccgacctgcgtaaccctgaaaacccgcaagtaggtagcagggaattcaaggcacatttatctcagatacagtccgtgtttgctcgtcatatcgctcgacctatatatctaacggcatcgcagagcctggcttgtcggaggatccgagagacctgacgggatattggaaaggctcaaagggagttgatcgttttctttcttatgtccaagttcgatccctgaattccatgggtctctgactttttaccaacgcatcctttgaacccattgtccagacgccactacggtttcacgggcatgacgggtgggatttagagttgacggcacgttttcgtcatttctctctttttatatacgtgtcgccgtgcaactgccgacccgaccaactcgaaggcagggcttgatgatgcaagcagtcgagcctcgccctgtcgtgcttgaccttgagcgattcagcgattagacctgcaagccgtatctcgtgtacgtactccattccatacagtacaagaccgttcgccgagatgtctatctcccacgatggagattattacggcgaggccaacgcggccgcgtcgagcattgctcgtcgactgaaggatctccggaactaccaactgcctcgactgaaggacagccgggatgcctcgctgcaagcagacgttgctgccgagatgaaggatgatctcgagttgacgatgcgtacgattgaggtgagccgtgtcgaggatctgtcagtcggagaggctcggccttatgatgttcctgtctacagaactttacagagcttgcgttcgaccaagacacaccggcagatcgggaaggtttcctagctcgagccgaggcgttcaagcaggagacgaacgagtgagttgatcccagtcgttcggtcctgaatcttatccaacgactgaagcaccactgcacctcctagtatccgcctgctctacagaaaggctcttctattctcctcaaaggaaataaaaaaggccacacggacgagcttgctccaacctcgagtcgtcgagtcgacaatagcggaaacaccagccgaagccagaaggtgggttcttattctctatgttgttcacatggtttgctaaagatccggtcactcaacatccggtgtttcagggatgatgatgatccattgcaagccaagacgaacgaagtgacggatgcgctcagacggacagtggggactatgaaagaggaactggagagaagcgtcatagtgacgcagatgtttggtatgttggcgttgaccatcgcctgaactcgtgtgcgctactttttgtacaagccaggtaacttactcgctctttgctttcacagatgaatccacccaaacactccgctcgacgagcagtctgtatgatcgttcgacgaacctcttgaaatcatcttcacatctcgtcaagcatctggaaaaggccgactggtacgaccggatgatcatcttccttgccctcggcttcttcttcctcgtcatcgcctttatcctcaaacgacgtgtactcgacaaggtcgctggaggggtctggtggtgggtcggcgggactttcaagatactcacggggaggggaaggtcaaagaccaagctcaagctcaaacccaaggacgtcggcaaggtggttgatcaggcgacaaaggttggaagcacgatcaagggggcagtcaggagcttgtcagagaaccttgcgcagagcgagacgatcaagacaatggcattgacggagacgagagtcttgacgagtactgctgtagcgggtacacggcacgtggagctgtaacatcgaacttcgtggagattggacagattggggttgtaacatgcatatggaacgctacacactgagcatttagaagctggacggaagactatgcagatatcgatcgaccaggatgagttgttcaagagtcccgtttgccttgtgtccgggcaccactcggtcggcgtggctacggatgctcaaatgcggtctcgtcccccatgtatgggagactcagctcgactcagatagcgaatggggaagggtgatcaaaacccccctcgctcagaattgggaaatacaaagtgtggtcccagcgcggaatcgaggcgcttcgtacctgccccgataactctcgaagcagtgaagcggggctgacccttggcagcaagagggacgatgacagcaagggggattatgcctcaagggtcagtagtaagaagcggctaagtgctggcgatgacaagtgaaccatattcaaagggttagcttcgccgccatggtcgaccatgaccaaaacgctcgtgaccttcgagcatgaaggtcacgacttcaatggcagtcgagttgacttctcagagatccaggtttgaaaagtctccggcacagacctccgcggagtagacagcaattggttgggctggcttcacgtctgccatggacctcaggcagaggtctttgatgtcgaggtccttgatgtccacctcaacatcttcatcttctcgctctgagattgtgttcccggaatcctgctcctcaaattcctcatcccggtcgaaaaccgaccttgcaattcacccggacttccggtgttccgtctttctgtggatttgtgcgatagtaatacaggacaagccctggtccttgggcccgcccgaaaatgatcgtcatacattacgtgccactcgctcgcccgcggctccagccccaaatcaagcctcgctctggatgcccatcttctccaggaccttctgctccctctcttcctcctttctacgtctctcctgcttctcgaatccttcggtacccatgctcttttcggcgagctcgacctgcttcaagatctcgctctcttgttccggcaccgccgcacccggtgtaactgtcgaaggtgttacgagcgccgatccgcgtgattgaatctgggtgagatagaaggattttcgttttgattgaggcttgccgagttggatcgtcactcggtcgtccagcctcgcctctgttcgcgcagccatatcgtgaaggacaggtctagtcagatgacgactttcccccgacgaatgtcggtcggatcaactcacgttcgtgctcgtcatgtacgagaaactttttatgccgcttcatctcctttaacaagatcggatgtaccacttttcgcgaaacctgatgatcgcagcgccgaggttgagctttttccacctggtcgctgatgcaagagagcaagggacttacggtcaccgtcacggtcttccccattacaccggccttggtcacgattccttctagtaccgtcatgattgctaaaagcgattgcagagcgttgaacgatgagcggaaggaacggctacaagctgccccccaagatcaggacgaagatgtctacataaagtcctacgtccatcagacctcgccggtcaagagatttcgaggttgcacgaccgatggacaaaatttaagtgtcaggctggttttacgtatttgcgtattcaataattgttaggtgatcgtcgccgccctaacaatcgccctaagccatataccacaggcgagtatgtgttgatggcgagaagcaaacacatcaacggtcgtctcgatgtttgactgagtcgcaagctcgagagtacagctactatatactatagacctcaaggtcagttgcagtctcgttcgctcgctgtgctgaactctatgtgttgatgagcgacgacgctttgataacataccctagctgctcgatcactcgaatccgcaaccaaagggtttgttgacaaattggcaacatgttcgtcttgaaatcttgtaagttcctttgatctcaaatcatgacgatggacaaagctgagtctttcgtgttccctcgtggtgatcagtgttcggtcagatgtggggtgagtccgcacggctgaccctatggttgttatctgcgaacaacgtcagagctgtttgtttatcatgtgcctttgacgtccaggaaacccctccaatcccgagatcatccagattccggctggacaactctacctcgtcagacctgatagtatcaaagggtccagggagtgcatgtgagatgccacccttcgtcaggctctgcttcgtgacctagtaatcggcggctcatccttcctttcgacctctttgttccgctcgttagcttcaaggatgccgtagccactatcaggaggacctcggtcgagcatcaattccaattggtgatcacacgtgcctacgaggaaggagaagaacaattgctcgatgaagatgccgagtgtcagtgtcttcgttcacatcgccgcctcctggaccggctcgctgatgcattattctcttttaccatagccgaagacgaaaggctgttcctcctcgacgaagccctgtcgttccggtctggggtcctcgacggtgacatcaccttttcctggcgagatctgttgggtgaccctggtgacatgtgggagtttgtttgcaacactaaggcggttcccaaggcgacgagcggggtcttcgaggtgaccgtgcttcaatgcatgtacgagagggtgggtcttgtcgttcgagggagagtggaagatcaagcatttgaggatacgctgctgacgctgaattttccgtacgttgcagaaattccagcgttcccacgaaaaggcgactcaggcggatctggaagctctcaaatggcagtgagtcctgagcgaaacttcgatcgctccgacttagatctgatatccgctcgcttccgaacagccccaagagcagacgaaccagcgatccttctagccgaatcactcggggaccagctagcccgacttctccggaacaactcgatctgcaggccttgtctctcaaggacgatgagcaggcgcaacctggcccttctacgccgccttcgcggtcgcaagccatccccgaggaggaagaggtggtcgctgttgacccctttgagagtgcaccagtcttgcaccgggagacgggtgagatgtatctcttcgacgtcgaggtcgaaacgttcgtcgttcaagctccagtggtcatcgccgagattgcagagggtggaccttacgactactggctcgtcgttcgccaggacggtgtggcgttcatctcggtccccttggactcggagatggtccctcgtctgcacgaagccgaacgtgctttcatgttcacctttacatcgaccgtcgaaggcaccagctcgacctggtgtgtcaagtttgccgaagacgagcagttccacagctggaaggccgctttccctcagtacatgtgggagggaaggaacaagatgagctgggccaaggccaaggcggacgaacaacgttacatcgggtctatctatgaggatgtcgagatggaggatgtcgaaggacaggacgacgacgagcccgaagaggaagaccttgaagatgagagcgacgtcggaaccagctcttacgacgaggaggacgaatcggagagtgacagcgagacgttcaacaaggccgccaagggcaagaacgaaaagctcacagtcggctacaagaatgaccgttccttcgtcgttcgaggtgacatgattggcgtcttcaagcacacggatgataacaagatcaagtggcagacttcgatcaaccgggtgtctgacctgaagggcaaggcgttcactcccaaaaaggtaggccgggtggctagattgcgcaggttgaatcacgacgctgacttgcccgggccgctacctagatcatgcttcacaaccaagattcagatatgttggtcatggaccctaacaacaagaactcggtttacaggatggacttggagcgaggaaagattgtggacgagtggaaggtgtcggacagcatcaacgtcgacaacatcattccggagtgagtttgaacggtccacgctcgtcgaacgtgacggctgacggcaaatcttcttcccgacagatctaaatatgctcaaatgaacccgactcagaccctgatcggacattgtgagtagttccgagagatccttgatgtctggatttccccgctgagcctgcccttgctacagcccacaatggtcttttccgaatcgatccccgagtcgagggtaacaagctggtcgagtctcaattcaagcagtatgctaccaagaatgacttttccgctgcgacgacaaccgagtcggggcgggtcgcggtcgctagtaacaagggtgacattcgactcttcgactcgatcggcaagaatgccaaggtgagccaggaccgattgtctgcgatgcgtcgctgatgagactgactggtcgaggatttcagaccgcacttccggcacttggagatccgatcattggtgtcgatgtgtcggcggatggccgatggatcgtcgctacatgcaagacttacctcctgttgatcgacaccctgatcggcgacggccgctatgcaggatccctcggattcgacaggagcttccccgccgattcgaaaccgattcctagaaggcttcagctcaagcccgagcatttggcgtacatggcaaccgagatttctttcacccccgctcgattcaatactggggaagggcaggtggagaagaatatcgtcacttccagtggtccattcgtcattacgtgtaagtcttgttctctgagttacttaagatgtcggaggacgaagactcatcgtgtcccgccccttactataggggacttcaagcgcgtcaagcaaggcaagctcgacgaatattcgatcaaaaagtatcagtccaacgtcgttgcagacgagttcaagtacgggtcagacaagaacgtcgtcgtggcattggagcacaacgtactcatggtcaacaagaaggatcttctcaaggtgacgactggttgggtgttggtggtcctatgcatcgaagctgatttccgcgtctttctcttcctcctagcccacgcgtgcttcgctatcgaccccgatgaagaagctccgttcgcagaacaatatcgtcaactcgccttactgattctcgagggcatcgttttgaggctatacatctgccgtctactcgttcaccgggttataatatgtaccatatcctttgtacagtcttgccaatgtagtataacgtacgatagctacagaagatccaaacggtttgacctatgccggcatacaaaggacgtcagctggctcttctcccatcagcggaagcagatcccgtgcctttggttctgagcttctggggtggtatataactcagcaatgtcggtcaagtaagggcaagtcgaacagttttgatcgaagggaaagatctctcaccacagtctcatagtaatgaaagatcaagcacattcagccagactcattgcaccgccctgccactcgccctcgacatgttccgctctacccgacaccgccaggacaagcgtcctattgaccgcatgtctgaatccgaagtcaagtccaagcttttgctttcggacaagactcttgccgagctagatcatgcgtgagtgacttgcttgtcaaccagctatggaggtggataccccttatgtgacttttcgatcgacgcaactcgatagcttcaagaccggtgcccccactctgtttacccaagaagattatgacaagatgaaggatgccaataccaggatgcgaaagcgtctggacgacattgcagcctctcgtttgacgagttcgcttgcaggaatgtctgtgaggccatccgtaaatggatcggtgaatggcaccacaaagcctggacttgagcagaggaggacgagtggagacgcaacccagctcctaagcactagcaatcccactcgatcagcctttatccagccgccaagtgttcctagagtacacatgctgtgagccgctagatccgatctccttgggcttcggttctggaatgctcatgaattctgcccctgacagcgactcggaccaatccatccagattcagaatgctgcaaacgaagccgacaggcaagccagacaagctgggctggcccatctacccaggccaaagggtcagcggactcgacgtaacggcccttctcaacctaatatgggtgcatacctgtgagttttccaccaacgggaagcttttgtgacagagacaaggctgaccgcctggatgcgttcaattagtccgactggggcattcgacgtcgaatcagacgctgacgactggatgtacgaggacgaagattccgagtttgagctagaactccccgagctgctgcgaaaacaacagcgagaagccgaggcgagggaatctgatacttattccgaggctggcagtgagggggagtacggggacatgagccatatcatcaaggtggatatggagaagatgacagacttgcaaggcaaggatatggaacgcgcatccgacaacatgcaaacgtcatgatggccgggtcactcccccttgtggccacctttggacctgatggacttgacacctgcgtttggacgattttttacgacaccgactcttgacgaccactacgttgtattggctgaagaacatagaactgtaacataccatcgaaccaaatagactggagcactgtatacatgggcagtgcatatcgagggcgatttgaagatacacgacgcagaactagcggctcagtcaaatcctcaaaccgtaaacacatttgatccccactggtacaggcggagtcaggcacacaagaccaagtatccaatcgagcttgacctggacattgaagtgactcctgccaacgttctcaacgatttcgtaatggcctattgcagtcagaccccgcaccgtgaaatcgtcaagatgtacagatcgacggatctgtctgtggcatgaaaaatgcatttttcctcgacagggtgattggaaacacaagatctctgtgacggtgagatgggctggttgcggtgacggggttgggtcgtatcgtgaataatgggcatatggctagaagctgttgcccctttatcccgaatcactccggtaccagagtctggtgtacaccatctgctgtattccgtgcaacagggcatacattgcgaaatggcctgcgagtctaccaattgtccagtgatgtgcctttccatactcgtgcttactctaggtcagtccgcaactaggctttgaaatcatctgaacctcccgtatgaccatccgagggccaatcacaggcgccgctatggaatcctccttctgtgtgccggtcgaggcattgcgacgagcgttacccaaaggctacctcagcatgaccttgacgtgaaaagcaagtcggttggtttccttgaggcggcgcactagatgaaggaggaggaggaggagatacaattgcttagtcagctcacaagcttcgatgatgaggagtatggaatgagtcccggtcgatttaggatcgagcatcatagtagtaacaggactggactcgcccattacattcccaatcccctcgatgtagctcctgataatcggcgtcatgcgttctgcagatttttaggaccccctattcaaaacagctggcctttgtgcagtaccttgccctgctacatgacaaccatcgtctctgctacgggaatggggcttggttgtaatccgctagccatgattatgtctacgccaaaggatcgaactatgaagagatcgttccccagactccccgtcatcaccggcccagtcctcgaggtacctgcttgaacggggcttgccaggcctgcctgcaaaggagctgcttgcgatgggttggcaagggtcaacaatgctgcgggaacggcgctgggcgggagcggggagggaagtctgcggaccagggtgaggtcgacacggggcgaggttagaataggtgaagaggagcgttggtgacccgcaggcgaaagggtacaaactggcagacaggtacgaatttcacccatgcgcgaatgccctagaagctgcctttgcgaggaaatgccgttttagggaactcggtagggtgggtcgccgtgcgtgagcacggtgtttcgagggtatcagagatgataaccgacaccggccttgttttgagctgatcagaacgtgaaactgcgaaggagtgtcagagtgacacgaggggcgccggtacccagccggattgatgcttcgatcgctcgtctccctttggtcaagagtttgttgagtcggaagaatggaacacgtctgatccgtcatctccatcaaaggaacagtccgggtatctcggaacaccgaatcgtgttttttgaatacaagtcaccccgaaacgccgatccctttgagagggaaaggaccccctcgcggtggggtctacattggcgtcccatagaaggcggtctgaaacggtgcgcggattcgtggatctcgcttcagagtgaccgtaaacgaggatgaatctgaatccgagggcaaaacagtcgaaacgaacgatgatcgaaaagcgatcacggtgtcaaggagggaaccaaacggtcgagctctacgcctctggtaagcctccaaggcgccaggttacgaagcccgaccttagcgcggaatgagcggagtcaaacacggggccaccgcagacagattggccgccggatcaggcgtttcgggggttgttccgatcaagatctgcctcctcttgctctgcaccttctcgcatttgttgacgatttgcgcgatttgggagtcaggcgatccttccggacctcatgacccttctttatgatgatgtcgtcgactcagggagaggggggaaggttgaaactcgtcggaatcaggggcaaaagagacaggacatagacaattcgtcaaacatactgcaggtcagcaagaggaacgacgtcggcgacgttgatcagcgctttctcccctccccccccacggggggggtttggagcatgacagcgatcgtattacggataggatgcggcataggaaaatcagaaaggtcggctgggagactggacatttcccgctttagagagatcgtgcgagatcttggcaagactgcacgtgtggctcgtggcgattcactcaatgaccgtatattgtcatcgcgtattgagcttcctatgtctctctatcccacctcaggcgatacggtcttgaccaaagtagcttcagcatgtggcagcggctgcccctgatcaacatcattctttctggctccagtcgagataaaggcgagcctgacctttgttgtttccttgcaaacctcttattaccaaggaaatgagattctacgcaacgagatctgtcgagtgacctcgctgaaggtgattacagtcaaatgtagacataaatcccgtctcagatctcgttcgatcggctctacatgtaccgtcgcaaatcacgttcatcggaggagtgtcccgaggtttctccaaggctgggtacaggcgatagcgggccagagggtccagctgcagatggatttggatgcagcaaggaagggtctatgaagcttggatccgtcgccattgcgcttggtaccaattggggcgcccgttcggcctccaaggttcccgttcatcgagaaatttcacctggaccgaggtcatcagtgtgaggttcgatcgaatccgaagcgggtgctgaaaaaggttcctggtcgccagcagtctcctggtctgaggacggcttcgagacctcgagcttgagagccatgacccccggtcgagagagatagggcgttccgaaatcgacagaatatacgtggacgttcgacgagatcttgctcttgaatctgacgatctgcttgtgaagacggctggaatcgtttggctcccagtatccccttggtcaggctcttgtgggttcctggcatgatagtgagacccttgctctcggcgctatccgagggccaatgtctgacagtaacgtgagtttctccattgaaagacgttgccacaatctcccagtcgcccgggaactgagattcacgtcgaatcagcgactagtggagcttcgatgaaaggctaccatcttaagcgacttgcaatttcctccttgctcctgctcattaagccgaagcccggttggtgtttcagtgtgacgtattgaagcagagcaaatctcctagaccttcgatcctgttcgaatcaggttcgtgtatgacgacatgcaaatgcaacttctgcgacagtcgattcatgaggggtgattgtgaagctgtgtgtttggaggcgtgtgcagggcgtgaacgacattcagcaccagatttacattctgcatacgcaaggaagccgagactttatataattggtgaccaggattgccacttgaaaatctgatgaggtcatgacaggaggccggccagtcagatgtttgacttttgaatcggcgcccctgatcgcaccgcacgcgtcctttgagaccacgagttcgtcaggttgtaatcggaggcaagtcctggccaagaacatcagctgatgatattcattatcgttcccccccagcactagccgtcgccatcatatgcattacaaattcgatcctgtctctttgtctcaaagttccgcttatagtcgcattgtctactacgacgtcatgtggacgttgcgattctatagctctcgcacgcagtcggcttccatcgagggcggtatgccacctgatcgagagtacgagtatagtccacaacgaccatctgcgctcataggccttacattgggcgcttcaggaggaaccccctaggtcacccccgattccggcgcgcgcgatgtcgaacgcaaacacgagcaaaaatcatcgcctcaacgcgcaaaaagataattcccgctagccgagtcgaacggctgaccgctacatatcatcaagtgactgattactagtgtagcgctctaccactgagctaagagggactacacatgttttttaatgcgcttttacgcttataagataccctcacacatcggcgcctacagcccctgtggcgggctgcttgcctatggcaagccctcttatctcagttaattgaagtcttccgcactgcagtaaccctcccttgcccactctcctaggcctctaggcgatcttgacagcctggggtcactatcgataatgtctctcagtggccgcaccgagtgtcttcaattgacgcctgtccatacgtcgatgggctcgactcgactctagatctgttacactacactctgtaattgatctaggcgctgcaggcccgctggactgacggtcagctttcgcgtgtgtgccctttggaccgtcagacaggcaggcagcttccgctggcttacccgtctgaccgtcagtccgacgagctgctttcacgcgtgccgcccgtctgccggtcacggcttgctcacttggactccgggctaacgcatagacagcgagtccgtagggatacgacggccgtatgatgggaatgtcgacactagtgtcataaaggcagacacgggctccgcgtccatgtcgatgaacgtgatctggctgctggccgacttacgacacgctggggagcaaacatcccggacacccggaactcctcgtgcacttacacagtcagcgttcacccatgtcctttagaacggatcgacagattgcttgcgaaaattcggtgtctggtcgctggtagacctccaaagcgacaaaaattgcgtcaacaatgggccacagtcgagtcgagccgactcagtattgttgatgagagcgctgcgcgcgcacccttctcaacccctgtcgaatgccattaacgtcgggcttgctgatgagaagaggagattcctcgctccccggctactttggactctgtacgaccttggagcacatgtcgcccgcccgccccatattcgcgtgcttcatgctcccactgtagcgtttctaactgtaccacgttccacatagcgcctttggattacagaaacagctacagacttgcatcgtgcaaattaaccaggctcgagggcaactcgaaaatcaattgaaaggcaatgcatacgaccatggagcagtcaagcccaaggttccctctcgacttgtctcttccatcgagtcgaggctctctgaccaccgtgcgcgcagactcgtgatcagagtcgtcaaggcgctgattgttcatatcgtatcacccactcagttatgcatacagaagaagagtccgtgtgtgtttttgaagctttttcccaacatcgccctcggcaagttgccaggaaaagccgctacatgacgtgtttacaggttgagatgcgatttgatgaacgatcgagtcaagctggcatgggaccccggctgggttggaacgccgctggttctgcttgccgatgtctgcgaaccagcggctacggaagttgcttgggttgaatcttgggaaaggagcgactcgccagtctccccagataacagcacgacatcaactccgatcgtacgacgtattccatcctgatctgtctctacccacccaaagctaaaggtcagcctgtaatctcccttacctgccgaaaagtcaacagagctgccatctcgctgtcgtgctagcatctctttagaattcgcccaagccgtatcgacgtgcagcttgggaccggcggaggctgccggtattttcacgacgcggtcggtttcgccgggaacatggatccgaattatgtccctgtccggactccactcgtcgtcgggcttcagttgcaacatgatatggtattgtccaggcacctacgaacaggtacgtaatcaagctcaccatctttaccagtcgatcgcaccgctagggcagtaaacttaccagatatccagccagcgctggatcagcaacttcggtctcatctgccaacacattcgcccatgcaaaactggccttctcccaaccggccaacccgtgatatgggttggtagcaactgggtttgaagacgtgattcgctttcgacggccaatgtcgcgaatattcttgaacatggtgtgctatagcgggttgtttgggtgaatagttctcaaaggctgttaacacgtatagcgaaccgtgtgtatatactcttattgacggtctactccaacctgagggactatttcgctctagactcactgacaggccgtagccttatatcttgatcagacagctgtggacgttcaatcacatcatacgcttgtacgctctggagaaaggaacgaccagattattacaagccgctcgacacagccaccggtggttgatatatgggcacgagttctcgtcggagctgtaggcaaagtctgaatcaacggttcgaggttgagattgccaagtcattatgtcacgacaccaattccccactctccaatcctttgatggcgtaacggtggcgtgacgacactgataagagaccgcagcgcccgcaagctcgactgctggatctgcaatgcttctcgaaacctggcgtgatccatttagtcccgctttcaaagggaggtcctcagcttgtcattcaattactgcttattgaatcgcaatcttgaattcatttcgtgccaacgttctgggccagatagcagggagtcgacaggaccgacgagtttgaatcttgtgcattgacgcgtggccgccgatatgaagcctgtatgattacagcatagccatctgaagattccccaaaggtagagagctcaccggagatcagacgacgaacgcgtgattctgctggcaaaggatagataatacaactgtaattgaatcgtcggtcgtaatttattacgcgtgatctcaagattcgccacctgtagaggatgatccaaattgtggttgcataacatgactctgactcccttccatccaagtgtactagataatttgagactgagagaagatcacaatttgatgggtacatgttgccgcacgatccagcctgaggtatttcttgctgaaacccgattgctgatatgtccagattatatggtttttcgcctattccacgcctgttccactaatgaagtcgaggtgtctagaccagtcaagatatagacacaccagtggactaaaatttatgactcgttggggaaaccatgcgctaggagagttgcagagatacttggctcgggtaggctgcgacttcacttcacgatctcacatccgtccgctatgggtacctttctaactcggtgtatctcgtgggactacaagacgagctcaaggtcacgaatgtgtttcaaatatcatcatcccaccctacatgttgtagctgctcctcccaggttttatggcttggtcttgacagaactctcgtcgtcactgtccggccacgaaacgtgtttcactccgtccggtgcgaaggggtatccctcgttctttcttccctgcattgtaacatcgggcgtcgatcccatgccaagggtggcaccgctacgagtaagatatgatgaatacgtctcggggctggagcatctagatgccccacaagatgttcccaaatcggcgggacctcctagaagcgcgtcaattttctccaccttgatgatcaaggcgaattgtttcgaatctgctggggtttcttgttgaaattgaagaacgtatccatccctggtataagttctgcccattataccattgcgccgcgaccagagacgcatcagctcccagtgcttgttctcatccacaggaagggatcctgtgctggaatatggggaccatgatgctcgccttttgtacagcttagccggctgtattagtgaccttcatgaggcaatcaaagccgcactcggcaccacgaggtccagacaaaggcttcccaagtctagcggacacggccatgcaagtatgttatgtagacagcgctccaagtatctcatctccttcgccgtcgtgccatcctctttatcgactgaaatgggcggctccaatcagagcctgattcactcgagctcgatactgtcgatccactaccctcggttgactgatttgactccgttcccgcactcaaccagcgccagagattaaagtcgctcgccgagtcgaccgtccgacttgatttcctccggctccccctttcgatagtactactcgttcctgaatcagacagaatgtggctcggtgcccacctggaccatgatgaagacttggtcgccctggatacatccgaccctgccaacgtcgtcgtgctagagttttcgctcgcgtcctcgctactactctccgtcttttccttgcggttctgtttccgttgtatcctagcgagtcgacgcctctccttcatagcaaggtggtaccgggcatgcgtcgatctttttacgttgaaggtgtacgtgaaatccttcgtctggccggcgttccagttgcacttcgtctcgtcccacgtgatttcgaggacctgggaaaagctgttgaagaacacgaacgctccaccgggatattcctcgagatgtccggcaactttcgtaatctctgagaggactgaaacgtctgtgcgataccgttctgccatgtagtttgtttttggatcggtaacaatgtggggattcgacccgtcggaatacccataagccgaaagtagcggccgatacttggccaacccggacctcgcaatcgaaggtctagcggacaatacactgtcttcgccatcgtcatgcgaacgtactacccattcccctagctggacaattgcgagtctatcagccgggagtccacgattcgtgtcatgaccggtgcttctcgactcacgatgataccagcgaccatcatgtctaaccaagggggatatcctgatcctttccatagcatttccgaccacttccgaaggatcctcttcaattcgatgtgtgatatcgtcattccggctcgccggacgtcggattcgtcagtggcgggttccaagactctagcccgttagctgcggcatcctgatccgattttgacttctgttcgcgaccaacgtattttcccaagtgcgctgcttctctgataccaagacgtcttcacaagtaggtctcgccttttagcggtgtcggaccgagtgaaaggagacgagagggatgaaacagggagtcgacggggggtgatgacgatgttacggaagtaaatttgggttgacattttgattccggtggatccaatatgacgtcaacggaatttgagtcgacagggaaagagacgacgaaggtgagcgaagagtgagtatatcaatggtagacatccatcatcatcctatgtcgacctcgcgactacgactcgagccttgacaccacctcaacaaatatagcggcagaaagatccacaactgcataccatgtcgcaaattcagaaacaaccaatcgtccaggacgtacaagagtcggccaagaggcaggtctccgaggtcgtcagggtcggcgaagatgccgtcacgagcggagcctggatgtaccctatccaggtcagccatccgatctgtgtcaggtcgagtagcgactccctactgacatgtcacttgtgtcaaatttagggaatcatctacaccctctctcgtaagctttgaccaggacctcatggcctgattcatcctgctcataacgagactcgaccgtacatttattccactcgcagacccgaacctcatgagacccctcttccccgttgtcctacgggccgtcctcacctcgatcggagtcctcggaaccatgttcatcttcgcctaccttccgcaagtcgccgttctcgccattgtcagtggacctctgggtgagttggcaacgagatgttgtcgtccggagaatcctcggcggcaaggagctcgggacgtggaacctagagctgatcttctcgttcgacgtgtgaaacagctttcatcggagccgtcccgttggtcttgggtgaaagttacattattatcatgttcctcaccaggacctacctcatcggacaagccagcaccgacctgttcgatgccgtacgtcgcgcccttcgcacacgctatctgtcgacccggcaaagctaaactctgaccatctcccaaacaggtcctcctctccaagaaccaccgtgatctcgttcaaaagggccgactcacctcggctcaagctgccagcggtgggaaaatcaccaagctcggcaaggccatcaccaagcccatcggagggaaatggttcatgagcgtcgacgggatcgtgcgatacgtcctcagtctgcccttgaactttatccccgtcgtcgggaccatcttcttcttgggatacaacggtgagttacctagacccgggcggtaccagggagatggagcggcgtactgacgagcggagtgctgtgattccgtgttccgtgcaggttccaaggcgggtccttcttaccacgaccgatacttccagctcaaggggtatgacaaggagaagaggaagcagatcatccaacaacgtcgaggtgcctacaccgcgtgagtacagtcatgacgacttgcatagcctcgagaactcatcgaaattgacacaatcgcctgttcttgaccgacgccagtttcggaaccgtcgccatggccctcaacatcattcctatcgtctcggtcgtcttcaccctgaccaccgccgtcggtgccgccctctgggcctctgatttggagaacaagggcaaggtcggcgcgtcgggcgcttcgcaggagagggagaccgaggtcaccttgggcgacgattacggcaagggagaggtccagggtaaaaaggagttgtaagccgtcatcagccgttcgatcgatgtaggtcgagccgttgtgagtcgacgggagggggggggaaagcgaaaccaaagcaacacgcgcagagatcctccgcaccacgtacaagagcataatcatatacgtatagaaatgcgctcgtagatccttgtgaccagtgcgatgccgatatctcatctgcccaaatttcgattcgtttgcctgcggttcaaagcggacacggttccagcggttggtggtggcatcttctaaagcgctggtgaatcacgctaggtatttgtagtcaagtcgctagctgccattcgaacgtatcgcatggcagacaacgggtcacgcgatccatgaaaccaccttcaggatacctcacctagcactatctgaaacaaccagcctcaaagatcaggcgcagctttcgcatcgtgtttcttgaggaactcgtctctctggcgctccgtgcgcggctgggcccggcccaaacatccttattttcctgaacgcagagttctctggtgagagagtctatcagcgacattatcggtctggaacggacatggccgacgacgatgacgacgactgggagaactcgcggagaccgacgtcataccggcttactgatgaataccatttgtgaatttctcatcgcaaggcaagactcggtctggacagggaccttcttctaggcttttatgcttggtgtacgatcgcggtgtgggcaccgaatgaagggcagaagggatatcacgcaagatggtcatgaaaagagtagaagaaacggaaaaaaacaaaagtcgtgtcgtgcattacaatccagatcaacaaccttgaagactgttctttggccagctgaagccggagccttctttggtttgcaagtactgcgagtggtaggaaagtcaaggtgagtcgccagtctcaatagagcagttcgaggccagacaaggatactcacgagatcccactgcatttcgaggcatcggcaagagggaacgagtcagcgaaacgccccagactcgagggaagccaatagcgaagcgactcacagtggtcagatttcggttattataagcctcggcatgtcgcgagatgtagctgcaaaatgtcgttgctatcagcgcgtggtccgtcgtacgaccctacgctatcactcactcggcggtagggtagtcatcgggatcacaaccgatgttgatcatatcggttcgttggtatacgcggacatagtcgatgtacatgtaattgggctgcagggcatgatgagggtcagcggggacgattcgatgcaaacgttcggtcagactcacaaagtcgaggttttcgaggtcgacaaattggaaattgttggacattcctaagtttgagcaaatgaccaagatcagccgacgtacgcgtgcgccactcgtaccacatttgacgcaccaaagttcaagatgatcgtcatgggttcctcggggatgggcctctggctgattccgacccgagaattgggaccggtcgcgccggccttgatctgccaactgggttttcccgagctgacccaggtgacgtatccgtcgtccctgttgtttgggtcaccggtgtattcgaacccgtagactccgaatcctgcaccctgggatcgatagttggtcctgtccgtgttgacgagggtcgagacggcctcttggtagacacctccgaggtacgagttgaattgcatttcgttggggtagaacagggtggccgcgtccgaggcgttgtcccattggtagaaatcgtcaaagggcgccgtctgcagcgattgcgagacttcaccgatcgcgtcggcaatattgatctgggcctcgatgatatcaatctcgggcgatccacggcccttgctggtggaaggacctgggtgatcctcgccgggacaggtacaagcgctccatcgctgtccgggcaagaaactaagaggtccgccctcggccccagtgttcaacgcggcacggggaccggtcccgttgacccaggtctggttgggcaacgtaccgacgtcgcacgcgtcgtacgagtagggccaggttccttcggtagtagcaccgtatccgggtcgaccgagctgtcgagcggggtgcgaggcgcgtcagcgtccagtttgggtgaaaggctcggggaggcgcacgacgactcacgttacccatggtccaagcaccgggccagaaccctccgaccctggtgttcccaggcaattgaaccgcgactgatcggattatacacgcctcgagtcagctttcccgcgcggccacgtatcccagacaggcagggcgccctgtcctcgacgaccgcgaactcaccctcgatgtacgcattcttgctgaaacaaaacttgttccaactctgcaacatgcccgaacggtaatcgaattcgtgcgtaggttcttccctcatctcgatgacgagagatccgtccttggtcgtgatctgaccggggtcgtaccattccatgtcaccggtaggccagtctacgcgacgcgggggtcagcgagattcgcaagaagaccgctggcggggcggacccgggactcacagtgcaaatcgacggcctcccagaacggatcatcaccggggtaaaacgtccgtccgtccgtattgaactcgtcactgaataccaactggtactccatcccatcgaaccctgtcctgctcatgacgttgcccggcgtatccttgtcgatcaggctggcgaaatcgggcatcttgggcacctgccccgtcgcgttgatcccaccgagattgaacccggccgtgttggccccgttcgaggcaaacttgttcttgtaaaacacaatgatcggccatcccgcgaacaaggtgacgagggcggcgaggaggataaagatggccaacgcgttgatccaccctcggagggaaaacgggtcccaatggtgcgtatccgagacgcccttgggatccggggtgtgcaacgcgtcgtccatgtcgtccttgccgttatcccagagcatgtacgtcgtcgtcgcgctgtcctgtcgaggtgtcgccggggcacctccatcggcgtaactgaggttgtgtcgatgacccatggcagcggcacctgcacctgcaccgacggcggcaccggatttgctcatgctcatgctatcaaacgacgaagacgattccttgctagggaatcgggaaggaccgggtccggaatggttgaccaacggttctctcgattgacccgaggggagcgtgtactgatcggcgtcggacgtcagcgtccaacatcagcttttttatgctttcgtgcttcttcgcaccccacggcggcgatgaccgggatgggcgaggacacaccgactcgagatctcgagactcacagcataaggtccatacccagccccgacctgacccctctgaacacctccgacctcgtcatgcatcccctgactggacaacgagtttatccgctgatgccccgcgtgcgggttcgggttcgggttgtccgaataagggacctgaggtgcttgatgttgttgttggcgaaaggtggcttcggtaggtgacatgctgtttcgatacgatacgatgcgatacccgagattcgcacgtcagcttgatgctcgctagctcgggtggtccgtacatttagcgtcagagtaggacttactggtctaccggtgtgtattcaggcatatcgatcgatgacggcgacgtgaagagtctccgatcgtccaatctagtctagtctagtctagtctagtccgatctagtcgaggcggttcaagttcgagatccaaaaagggaggaaaacccgactccttttatccaaactccgggggttatcgccgaggtttatcgtatcgttcgatccaggggaagattcccgttttatgacaggatggtacggaaagacgagatcgacaggaaagagataggaagaaacctgtgctgtgtttatcctcttctttcttcttctagggatgtgcagtgcggaaggtcgggatcgagaaggagatgagatgagatcgaggcggctgtgtgaacgcgagtcccgaggaggagggggatgtctaccggcgaggagaggtccgggtcgtcaaaggtgtaggcgtaggctgtagtagtagtggtagtagtagtagtagtagcagtagcagtgggttgttgtcggtggtggtgtcgtgaagagacgtagatgtagagtggctagagtggtggtggtggtggtggtggtagttgttggctgtgttgtgtttcgatttccgcgtcaaagcgagggcgagggcgaggatggaggggggcgggggggaatgatgtgagaccggaggcgaaaatccgactgatgctacggtcaaggaattgagcgaggaagactggcaaggtcttatgaatctagaatgtagatgtcgacctgggattcgctgctgatggtggtagcgagtggtcctcgaggtgcgaggtgcgaggtgagtgtaagtgttgatcgagtcgacgttgattgatggccgatggcgaatttgtgatgatcagaaggtgcaagagtgaggtagtgacaagtgaggcaaggcgcgcggggctggggaggagggggagacggacctacgcacgcgcgtgtgggggctcacatcatcccacccgccacacccacgacacccatcaacacagcaacacagcagccaacactagcaacaccactactctttacgtgcacgcgcgcggggtcaaaggggaagaaagaggcgacgaggcgggagagacgctcgattacgttatccccccacccccactccggcctctcggttggatggaagattttgagccaagacgatgtgacacaacaacaactcaacgcaacgcacaaggtgcaaggtgcaagcgaggccgaggccgaggtggatttcatcggtaccgccatccatccacccagctagtcgactactagctactagtctcccaattgacaatcccgatcagcctgttcatggtcctagtagtccacaggcttcatgtcagctgaaccatccccatgcgagctacgatatcaaaatcatcactatcgaaaatcccctccctcctcccctgcgctcagctagctcagaggatcagatcagaatgggaaaaaaaggtcgatgatttccgatgaaatgatcattacgagaacgcggggacaagggggatagcttccgagcgcgtcgacccaccgaccgatcgctaacggatgttacatcgcacgttcagggccagggttcgaggttcgaggttcgacgttcgacgttcgaggtttgggtttgagattcgtatgcatcgggatgatggaaatctgacttgacctgacttgaccgtgtttatactgacgtgaaccgtgaaccatgccctatcctatccttcttttaatcgtactctttgtcgattattaagcaagatcgtccttttgacagatgtccggggacggcgtccagaggtacgggtaggggtgcagcgacctcgaaagaagcacgagcacaagaggacaagggggggggggaccgaagacgaagacgaagacgaggagggagagccaactcgacggtccgtcccgatgagactgtatccgagcaggacatccctgacgctggccatacccacaagccccatcaacccgtccgaagagcgccctggagacttttgcgcgtcgtatcgaccaaggccgctagaaacatcacatctacgaggatgataattcggtgaatgcaaggtggcaagtcgcgaggtagacggtgaccccgatcgtgacgtgacgtgacgtgacacgatgtgatgtgatgtgatgtgatgtgatggtccaccgaaatacccccctatggatccccaagaatcagcctagggccgttgtcaccatcctccgtggtgatcaacgattcggacgactactgacaggtctcgttccgtgcaacactcatcgggatctcggggcggtactacggaccgtcaaggtgttgagccgtactcgtacgtcatcgacaggcaagtcgggcgagaactagccggacccgagtgtgagtacgatttttttcgatccggtggtagacgattgcttttcatcgatcggcaagcggatcagatgagatgagatgagctgacgccgctccgtgtggctgtcactagctaggggtcccgtctactccacgacgacaacgataacgacaatggacgacgacggcgtgtctcgcctcctcccatgacaccgtgactgtgatcgacactcgctgcgggacttcataaggcaagccctcgacaaggacgccgacattcggacgacacatcgtcagtgtagaggttgatccggtcgatgctgtcctcgttgctgttgttcatgagcaaggtctggtcgaatgaggtggtccgtggtcgcactggcatacatcggatctcagtctgagatccatcaggtaaaggaccggcgggcttcgttgtcgtagtttcttttgaccgtcatcgggttaggctccctcttcctgtcatcttgcttggatctcgataacggcgaaacatctcgtactctgttgtcgatgtacgggtacaagtacatcgcccttcggtgtccttcccgtccagaaccaattgcaccttcaccctcgtcgatcatcctcgcttgcacctatcattggacagtttcgacctcgctgctgcaggaattcaaaaccgaataccaacacgaaatgtcttccactcctatcacctactctgccgtccgtcaaggcaaagccgtctccactggccccaagaccggtgcgaccgatattaagaaggccggtgcgactgaactatcgtccacacagcttgaccttttgcctccacgaaagcgacggaatggagcctagcgtagtttgaaagctggattgcaatgctcgtgatgtcgacgaagtgatccccaagtcgggattggtacgcaaggcctgcaaagaaaggcacattagatggatactcgtcgattttcttctcaatactcgtgtcctcggggagccgaccattgtcatagcccccgttaacgagtagggtcagcgcgcagatcgaggtcagttgtcaggaggacgtcactgacctttatgtcccggtacgattgtatcctcacgatcagtcgcgccgaggcaaggttcgtcatttcgaatacgggtcatagtccccgatgaatcggcccgagccagcgggatatcgcggtccacccgtttgacaagaagcctgctaggccgcataagcgcatccaaggccggccgatccaggtaattatggtcccctcttgagcatatctcttccgttgagcaatcacatcatcttttcatagctctcaagccacccgcagatttgctgacgaggtgaatgtccaggcgtctcgactcgtcatgaagaggcgcacaggcggccgcgtgtgcagctggacggcgttgacgcatcgtttggtattcgcatcgattcgatgcatctcgaacttgcccttccatctttgtgaaagtcctggagtccagtgcggtcgttggtcgacatgcaatgtatatacccgcaacattcacacctgaaacctggtcccgttcgaaaccgtctctcgtccatttctcgcattttttgcttccgcgacgatcgagtcgcgatatttcacaaagttgggaacgtactttggaagggcaggtcgggatttcaacgacccagtgactccgcatcgtacagcccgtgaccacaaacatctctcgagcaagcgacctggatcgtggctagcaaaatgtctacagagtcaaaacccctggcgcgatcgctatccccggccacggaggacacctcggccaaacgtatcaagctggacgacatccccgcacctcccgccgtcccgacctcgatctacagcctgcctccctcgactttcaagttttgcaaccaagatggcctcatcggggtcctcgaccaggatggacagtatcacctacgtgagcgggatgtagggatttctgagtacttcagcacggaacaggggaaattcgaagggatcgtcaagcagaggtttgaggatttcatggtctacgaggtgaacaccgagggagagatcgtgcacctcaaagagttggcactgccagaggatcccttcaatcagccgaaagagaagaagaccgaggagaagcccgacgtggaggaagaagccgccaatgacctcgctcccgaggcttcagcttccactgcaacatcatcggctccggccgcgacatccacctcgccagcgacggtggaccagactccgacgtcgaccgaggacacggcggacgacctccctgccgaactccgactcgcccctcacgctcagtggtcgcactcgaccacacgtgctctccagccccacctctccaccgcctccatcatcgccctacacgatctcctccttcaaggccgaaccccaccccgacctccccccgaacgcccctcggacggtggatggggaggcatgaaacgtcgggaccacgccaaggaagaggaagaagccatgaacgagatgaacggagagccccaggttctcctcagtggacgggaacgagcgcaaggtcgggaccggggcagaggacgcggtgggatgcgcggtggaaggggtggaatgatgggtggacacatggagcggatcaaggacgaacgcgaggtcttgtccgacgtgagtacaggccctacgagatgtctgatggtgggtttccacgagctgacccgtcgcacttgcaggtcatcacggacaaggcgaaacgtaccgaattccacgcgaccattcgaaacctctttaccggcacttttgaaaccttttcccgtgaagtcgccggcgagactggatcctcccgtatcgccatcaaatgggcaagcaaaggcggtgcccaaaagcccaaacctaagcgtggcgcacacgacgacgaccagcccaagatccccaagtacatccatttcaccctccaaaagaccaaccgagacacccaggattgcttgaaccacatctcccgcatcctacgagtcgatggcaagaccatctctacctgtggaaccaaggacaaacgaggaatcaccgtccagcgcgtctgcatgcaacgcaaggggctgaaattggcccaggtctggaaggccgccaatggcctgagttacggaggtcgaacgatgaagcaggccctagaggagcgtggagagaggggagtgagaatcggagatctcaagtattcggacgaataccttgagttgggcatgctgaagggcaaccacttcaccattaccttgaggtgagcccggtgttcattcgtcctgaccaccgaatccgtcattcgttaactctgggttcttcctgcgccgtgatcagaaacgtcaaggcggaaagtcccgagttgatcaacaacattatggaatcgatgaaatcccgtggtttcatcaactattacggtatgcagcgattcggcacggcctcggtgtcgacgcattcggtcggtctggccctgctcaagggacaatggaaggaggcctgcgagatgctcctctcccgtcgacagggtgaacatccggattgcgaggaagcgagaaaggcgtggtgggagcgtggtgaccctgcagaggccctcaagctgatgcccaggaggaacactgccgaacgggccatctgggagttttgggccaggccgaaccaggaggccggaaaccatttcggagggctgctgaacgtgagcttgtggtgtcctctggctgtttttggacccctcgtcgctgaagaccactccttttgcagatccctcgaaacctccgtctcatctatgtccatgcataccagagttatgtatggaatttgatcgtctcggagcgaatcaggttgaaccccacggatcccatcgtgggcgatctcgtgtttgccgaggaaaagaccctcgaggaagagggcaaagacggtaagtccacctcgtcatcgtctccaacgtctaatgggccctgatgatactcgctctcgttgcagctcaaccatcatcgtaccgaggcaaccccaagcgcaactggcaaacgtcgtcgagcgtcgaagtcaagatcctcaaggaagccgacctcgccaactacaccttggccgatgtcattgtccccttgccaggttacgacattacctaccccgaaggcgccttgttcgagcgataccaggcgatcatgcaggaagacggattggatcctctcaagatgaggaggaatcagaagtaagtaacaatactctccgaatcgtgccggcgttccgacagatctgacgctttcatcctcgcagagagtactcgttggaagggtcttaccgcaaaatcattcacatgcccggacacctctcgtggaaacacctccgctacaacgaccctgacgtctctctaacgcaatcagacgaggacaagttgctcgggctgcctgcccccgagattgacgtccctggagccgagtttgctgccctgcaattgagcttgactcttggcacgagctcgtacgctaccatggcgcttcgcgagctgaccaaggaggacaccagcgctcatcatcaaaccaaattgaccgccaacgcggatgaccaaaaggccaaaactgtcgctgacgacaatgccgaggaagagcaagccattgaggaaggtacggcgaaccgagacgacaagatggaagtcgagcccgcaacgtaatgaatcacgatcgcgtcggcttgatcgtaccgtacactgtagtcgtcgatcaaacgaatatgaatgagcacgaagcagttactgcctctatcgcatgacactcaccatctcggcgcttctggaatgagagcggtatctgttctctcgtctcgctggatgtcgataggaatcagcagccgcgcaagattgtacaagtccatcagccaagcgcacctgatcaagttctggctcatttcgatcatgaaaaagctactcggcatgggctgcgtcgtgtcaccgccctgctgctcataatcatctatactatcgagtcgaccaagctgctccccccctgcacgacgtgatcagctgacatgtgtgcagtgcaaaagggtgttgccatcttacatggcgagaaggccaacgattcgccccagctcactcgaccgctgttatgcgtcccagcctgggcgggagctagcacatagacctgaaactggatggcaacggctcgctgggaagatgtggggtgatcttttgctaattagcgcgggatgtgacgcttaacataccaatcgcttacgcagagggtcgctgttcataggtatcctttattagcatagagtggggttcgggcttgaaaggggactgaccccaatggtctcgacctgtccttagcgtgaacgcgctggggaagaccaatgtccctgcacctctatcgaccaagatcgagtgcatctctggaaacctcaagtcgtaacagatctccaggccaacattccctatcccctctcccatattcacgggatccttgatttcgtgccctgccaacattcgctcagattctcctcgacgcggtaccgaaggcaaagtgccgtccaggttgggctgaggtggaggtgcattaggatcttttagggcgacgtcaaacaggtggatctaccgtcggatgggaggggagatgagtccctcgagctgcaggacagttaggtctgtaacatcacctcaccttgcggtagctcgacactagctcgccttgcgggtcgatggcgacataggtgttaaatgcctttttcccgtgctcgctctcggtcctgatcgcttcctcgtcatcgggacccggtagctcgtggacgcccgacgcgatccaaacgttcaactctttcgccaggtcttgtagaccacgggtgtaaacatgagtgcctagcgactgggatagctcgtagcaagcctcggtcgtggctacgataaagtccgcggcttcaggtaggaaacatgcctgtcattcatgaactcagttttcgctctcgaccggtcgccgcggccacgaaaatgctcactttggcgcccgcaccgacggctcgtctgatgatttgttttgaaatctcgagattgtgtcgaacatcgtcggtcgagcagatttggcagatggctaccttgacagttgtagtagtagttgtcgagggagtcctcatggcgtcggatcgggagatgacaaacctacgacgggtccaacctatcgtctgaaacttgatgacagtcttaggcttaggcaggcgtagtagcatcggctgatgactacaaggacttaacctttgcaatgtcacagctgttcccgtcgattctttataggcgtttcgatcaatgtgtaggatagttttgatgttcagagagtaaaatctggatggctgacggctcgctaggttgatcatctgtccaccttcggatatggccgaacctcgagatacagataggggtaaacgagcgagcaagccagcttcatgacaaaccgtgaacctttcaggtaacgcttcaataccgagatgaaatgcagtgtgtatatgcaaaaagaaagaccataagcccaggtacaagaagatgccggaatacaagtgaggccccaaagaaaatctggatacaaggtatgctacaagcagtgacacgggtcgccgccgtgatttcccaaaacatgaaagcgccgaaacgaataattgaccgaggttgtcatgaaaagagagatccgttgatgaccctggctgaacgatgttgcagcttcctccgcttatcaggtccttcgcctcgacaccggcgggtcaaggtcgagggtaccgaaaggctttcgagcgatatcgacaaatcctgggtgggttcgatgtcatggtaggtataggcgtctgttgtcgccgtgaacatgttgtcgtatgggatgggtgtgagagaacagaacgagggcgtggaagccgacgaggtgcaggtggattcgggttcccggaggtaggctgggatcctccatgacatcaaggatgactcgaacgagttttcgtcttcgtccggacgcaagtcctgttcagagccatgctcgacgatctcgacgtcgtcggcgtcattattgtcatagacgaggaccttgtgggtctggtcatgccatgaagaagttggtggaggcggggacaggtcgccgtttgatgatgcgtccgaggacgtgtatcctgatccgcgtcgcaggagcgcgggtggtgaagaagaaggactgctcaagtcgaacgacaggtcgtctatgacacagggatgaaggatcagcgcctgagatataccgccctgagattaagaacaagcgatgttcaccttcatcttcctcttcaaatactgatgagtatctaggatcgtactctatccgctcgacagcggcctcgagcacacccttctcctcgatgaagagcccgagtaggttacccccgatgggtagtcgacctgacgacacctttcgcagtacgggggtgtcgcaatcgaggtcatcgttattggaaaagcagaaccggtgttgagagaacgagaccgggctcggcgagtgaaagtttgagcaagatgagaggtaaggcgcgggagggcaggataggtcgtcgtcgtccattggaagcgcgatataggtagggcgaggggtctcgatgttcatcttgtacggccgatcaaggtgatctgacagagtatgaggcacaagggtctttgacagaggccgcttcatcaaggttaccccctgacagagtttgtccttttcatactattccctcatatacctacgccgctacagcctgtacagagtcttgggacctgttacagacggttgatcgctgcaaactctctctcctactccttgtctctcgcttcgacgatctgctggtgcttccgccgcgatatggaaagcctatctcccctgagtcgcgagcccggctcttggaccaagggcgacaggggggggggaagaggcaaagatcattcttcaaactgatccatgggactctctctccctctccccctgtggatggctctggccgtctcccacggaagctgcctgcgctaccacgatctagccaactggggcagcaggggaatggcgagtgagccccatgtttccgcttagtgaacctcggcttcggaagaaaattcatcaaggcacgacgacgacaggtgacaacacggaatcaaaatcgaatcgtctcgtcccgcttgggcgtgtgaactcgtgatcatgacagatcgatacggctgggccatgtctccctctacacacgaggcagccgagccagcatctaatcacggttcacggcatcttgattccgctctcgatgagccttcttttgcttttcatttcggaggctcccacgcgaaggcgaaaaagaaaggattaaccgaccgggccaactgtctcgtccatgcccgaacgagacgccattctcagggctggacctgtcacgcccccaactcgtagaattgggactagttggaaacggatcgattttttcctgcctgcgaacgtttcggtttgccactgttgcatcggtatcgctgaggtcaggcgccaaaggcgaagatggtaacttgacagcccttttccatagaacgatcgaaacgtgactttgcgtggattgctaggtacaagtttccagcgcgaggggtcgttctggaaagtctcggtccaccttggaatccctggcgaggctgacgatctccggcgtcacccagcagttcaatcgtccccacgaatgttcaaagatggacacgacctgggcctcgccatcagaatccacatcgtcgaagcgagccgcaagaccctacgcccattcgctcgtttgacgaatcaacgatgctctcgtcagcgccaacggaaccgagtcgacgcggttccctccgccacatgtacgccacgccttggcgcggtacctcgcagttgcatgcgggggtcctgatggaatacccctatccaggttcgaaaccctcgcctcttgtcaatctggaagcagagtctgacgatatgaatgaagttccgagcgtgttgccccatttcatgtcgtccggggacggccgaaacacacgagatgacatgttcgaggagccgacccgaaccgaaatcatcgggtctcgggctaactcggtgtgtagcccggtcggaaccccccgttcgatgctgaaattatcgtcgactcggtcgtctatcgtgatgatgccattataggatacagaggagggtctctccggatgatgtccggttctcgaacgcttcgctcgtttcgtgatctagtggttgccaccattgcccaggctggatcttaatcgctccttgcgatctttggctctacgcgtcgaccggaagaaaatccgtatggccggttttatcagatcgaggttggtctcagcgaacaccctggtagcgggaggactgtaagtgacggatcatgagcaagggctgcgagcgaggacttacttctcgaggttggcgtggaattcctgtttgtccgctgccggtgcgacgtggcccggcaagccctggacggcctccatggtccacgcccgcgcttcagcgggacataacttgaccaactccttgatgatatcgataatggcgtcctgactctgctcgacgtactcctgaaccatgccgttgacggcgatcgtgatgatcttgtgaccgtacgttttggcggcggcggtgattgtggcttgatatggcgagccgtcttgagttcccggttccagcagccgcacgatcgtttccaatgcgttcatgacaatgtcaggcgagggtagggtgagcgatacgagagtgaggtcaaaggcgaccggtagcgcaggtgaagacaacagtacggcgggaagtcgcttgaggtaggtccgaaggacatgaatatagtcgtccaatgctgggaggtgtcgacggcatgattagtacgacagccatggcattgcctaagtccatccaactcaccgtcaggaatctgggtcgcatcttgctgcacttccaagctcttgacctgcgtcgtcatcctctcgagcgccgatgtgaacgcagtctctaaaaccgccccttccggcgaccctgccagcacggccatccgttcaccgaatagcgcgacggtccggtcaaccaaccagatgtagctcgagtgtcccgacgcttcaaagcacgtcatcatcctggccagtagcctcgggatcaaaggctgaatatgagtccatgggaagaatccgagtccgcgtcgcagcagtcgagtggccttgtcggctactccgtaggaagaggcatacttgtccaacagagcctcgatgatgccgtaaacagcttctggcgtggcgatgcaaccgggaggcaacgtatcgataggatcgacgttgactatgtaagcctcgagttggtcgagcgcgcctgagacatcagggttcaatcagcgaggtctaaattcgctatcggaacaccattgtcaacctaccgacaacagggtccagctcgtctcgtgtcagaagcatggcaccagacgttgccgactgcagcgtctctagcaacggctgcgtaaacttttgcagcgcttccgccgcctcggcctgtcccatcgaagcaatgacgtagccaatggcctctgcgacgtcgatcttttcctccaacgtcaacgacaacccggcagtagtcacaaagctatgaagctgccccaagtagggcacgagatgtgcttgacagtcctgacacatgaacttcatcgccaacgcagccgccaacgagacgtcattttcggtcacgctgaatccttccgagatgtagctcagttgaaagggcaagtattgcggatgagccgcgatccagtgggtgtaccgagagatgacgaggatggcggcgtattgaatccgggtatgtcggggaagcgtcggcagcatatccatgatcatcggcaagaccgagtcgtctgtgggatcgacctgagcgcccatcgcacggatggagaacaacggcgcctcgatctcctgccacgatgcagcggaacccttttgcaaggcccccatgacggcgtcgtaggcccgcttcatgcatacattggcgcccaacacgctgcagcaatctttgagcgtatctcccattcgatgcctaaacgacctgaactcgtccctcgactcggcggtctgactggattcatcttcggggaatcggaggtgcacggtcatgctctcctgcagcttggagtacacctcgaggaaaggcgcgtattgcgacgccgcggggttgtcatcgtgtccgacctgcttgccgagtgcctgggcgagcttccaccaaaagtcgaaggtgattggcacaatgtccaggtcgtgataagccgagcactctccgatcacttgaacaagaggtaggaaggtctctgggtgggcgagcacgagttgccggtaggtctctcccgcttcggtaaagatccggcagaaccctcggaccgagtcgtcgtcctcgttcgtgacggcctgatggaagacgtcccggagcgcaatgaccctgggcacgatcaattggaccacctcgacattgtcttccacctcttgcgtctcgtggatcaggtcgcagacgacatcgacggcgtggtcaaacagttcaatgttgccaagcgcgtcaaatgcgaatccgaacaggggggaccgggcgatcagggtagcgtccagttctccggcctggagccagcttcgaagcgtctcaaagaccagtccctgtagtcgaggggtaacacctgcgacagggtcacgattgagctcgggtcgtcatgtcacgcaaacacttcgtggccactcacccggagcgttgatgtacattgctaacaagcccaatatccgctcggtctggctcgtcaacaactcttccgatcgatccctcgcttgaactccctgtcgaacgcttgcaaagtcagcctctacacctcgcacccgactgaagatgtgcttgtcgatcgggctcacactgatagggatcctgccattcgcagactcttccacgaggcatttcagaaactctagcaacatctcgacgcattccaccctcgtcccaaagttttcaatcatcccgggtacgacgtctttccaccctggcatctgaaaggccaggtccgagagggcgaggcagagttgagtgacgatcgctcgagaaccggtaggagccgagggggaggaaaaggtcgtcagggattggatgaaggagtctcgtaacgccggtagggattcggcggggagttgagagaggtcgtacacgacctgtacacggggatcaggagatacaagggtcagctcaatggactggggaacgcttggaggtggtagccaagtgggacatgagaggggtttccagacaccctaacgcccgttctcttcctacttgagctcgcactcgcccttccctccagccgcaattctgtggactttgactcaccttgctcctcaacgtctgagctgccatgatcctagcctccaagggtgcctctcccgaggtcaagatggtgtgacatgtctgccatgcttcgttctacacaccgtcgggataggtcgtatgcaatgaatggcggtaggagcggtgaataagaatggcagcaatgtgggttcagctggtcatccctctcggaccatcatcttctcgacagctgccccgacatgacccttcagactcaccgtatgctgaaactcggacaaccattcattggctcgtttcttctcttctctatcgggattcgtaaacaaggcgttgacggccaagagggccatctgggtagggtcctgcgtggctgccatgatgagctcgaggcgatctagtgttgtaactacctgtacgaagtgtgaattgagagtcgtgtggtacggttgcgtgttttatacggttgatgtagcttgacgtcgaattgaaatatgttttgagctctttcaagctgcaagctgaccgggatcttgaattgctcgcgacctgactcgtgatcgtgaaaaggatgtgttggtcgtcggcagcagtagtagtagtggcagaccttgaagtaccttgaaagatatatcaaggggggatggctaatggactggaagaagcagatgatttgcacagtgattttgagatgatgatgagcatatttcctgtgtcgagcggtcaggcaatcacgtctcctttctttcttccgagtccgatatcacgtggaatcagccgacttcaagtcgaatgcatccaataaccatagccactttgaaccaacaacacgacaaggtgaaagttaattagtccaagtattcgaaagagctcgagcacctcatgttctgccaagtaaaatcgccccgatcaaagtcgttcgataccacccatatcgcaacgactgatcgcgacctcgagccccagagcgctcgaccggttttagccatgagcagatgcccagacttgacacaccctgtaagccctcaacgtacacacgcatatatatatatatagaagacactcgaactacgagccgatactgctagacaagtacaaatcgatcccaccctaatcgatgggatcacaacgacgccaacttttcgtgcaagacgttggccccctttcgccaactcttttcgacctgctgcatcacctcgggcgtggccaagacccgcttgaccaccggtccgagctctgcgtcggatttcaggttgtcgacgagttccacgacgacaaagggagcgttcccgagggcgaggttgacggcgtttcgttctccaccggcttcctcgctcgtcaacgctcgccagaacgccttgccaaacgaacccttgagctcgtcgttgggcgcatcgacgctcgaggtcgaactgttgtatcgaccgccggcgagcagggtcttgtacgctcgatcggcgtacgaaatgtcgaggatgggtgccgtggccgggtcctgctcggggtcgaccgatgcggggttaggataggtctggccgataggtccgaccagggcatcgatcgcagcggatttgtctataggtgacgggcgtgggcaagtatcatcagacgagacgcttccgacgtcgacatagcccgacgctcctctggactcacctccttcagcttcgagcatgatctccgtgaccaacaaactcgccccggcatccctcatcaattcttctccctggtcagcgacgagcttgatcatatccgggctgatagccgcccgcaattctttgcgtcgagtctccttgttcttcttgctcgtcgcagcggcagtagcgtcagtggcctctaggtccttgatcgtcgaggggataaagtgtcgtgtcgatcgaggagtgacgaggtacaacaatacccgacgacccgtcttgtgcatggccaacccaggtgcgagcaccgctacttcctgttgacggcaaggggttgggagaccctagtcagctttcgaacgacagagacagcttctacggtactgacggtcaagatggccttggccatcatcttggtatcatcgaccacatcgaacgcggtgaacaggaccatctgagcctcggcatcctggcacagtttctccagatgaggcttcaagaccctcaaaatgttcttcctatccttggccaccccacgagcgagcatctcacgggcgacggcggacccgtccttggtgtgtacgatatcggcgagcgactcgatacagacgtcgaggaggtcatgcatcttcttgtcggcttgctcggcaggcagaaaggcgtagatcgcttgcaggtattcgagtacgagtcggtggaagatggcctgagcgagcgcttccttttgtgtagagttgaaactataggtcgtcgggaacgtcagcccgagtccatccaaggtgggggggcatggattgatggaattgatgagattcttgatgatgatggtgggtcgctgtgtgatcggttcaggcatcaccagcaaccagcagcagccgtttgtgacttttgaaagaaagtctcggatctcggaactcgggtcaaactagatcaggaatcaggaatcagaaaagagaggcaaccacctcgtgttatcccgcaatcacctaaagcaagaccgcacctggctcgttgaccgaaacatcgagcgaccggccgtctactttcaaagattgaaaggcacctaccattgctttgcaagcgataccaccactacaccacacgagacgagacgcacgagcgtccttaggttccctttgatcagggaaaagaaacgattccggcttggcagctagaaggtagaaagtgaatcgactggctcgagacgggtttgggatagaagcctctacaagctacaagtcacatcgacagaccttcgctcgctaccacattacgacgccggactcacaaccatcagacaacaacggcatcgagcttcatgatcttggagtatcatccgacttctcgacttggaacttgaacgctttatctacgccccttgcttctttatcaaaccttgatcataccatcaccgggctctcaacatggccgccacatccgctcgacaaccacacccattcgctgccgcatcaacacgggacgctcgatcgagaactcaaacgcaaatgtcgagctcgtcctcccagatgttacctagcatcacttgctcgtcatgtggagtttcgatccagatggacgatctcggttctcatatctgccaggccggagcccggggatcgaatatcatctcgaacggatcgtcttcgtcgggttaccaacatcaacagcctttgccggatacatatcgaagcaaggacgagagaggacattctcagcctcaggcacgtcgagaacaagcacgacctcagcgacacgatcaatatcaacgggaatcatctgcctcgcagaacggtggagagaaacgaggtgggggtttgaagttggacatgagccaattgagacccccggacacttcgggtttcttggctgcaggggatgcggggatggcaggtgttggaagacgggctttcggtggtaagtcctcgtgcgaacgtgtaggtgggtcggtatcaaactaaactcgtctctgatacgacccgattcgctcggcttcatcgtaatctctctcaccgtcaggtacttcacccaccacgcccgtctaccactctccctttgggacatcacctcagaccccaccctcggcggccatggccacgcctcctgcggcagctcgtatggggaaacaaaaccagagtcaaccttactttatcgcgagccatgacaatttcaatcgacaggtggaggaaagggaacggccacatgggcaaggtcaggaagggccagggactttcataccagccgggtatcgggagaggggtcctagtccgatgttggggaattccgattgggggtccgctgcgaggcagggcaagagtgggaccaagccgggaacggcgtctgcaccccgggaatacgcacgcccacagctccacgcttcgtccagtcggtccgggatccctatacaattggacatcaaaccgcaggtaggctcgggcatggcatcggtggtaccggataccaagacgttgcattccccagcgtttgtgccgcagacggccacctctggttcttcctcgttcggattatcgcaggacaaggacaaagataccgtcagatcggccctgatctcgccggccggtaacgggtcgatcatgacgaacgtgaccggatcgttgaagacggggattagcggcggtggcacgaatcatccgagaccaaaggcgacgccgagcgagtggaataggaagatggaaggagctggggtgatggatctcgtcggggctggcaacgcgggtccggggcgacacggccaagcccatgcagaggtggctcgttcgaggtcaagatcgagtgcgagtaccaacccgagtgcaagtaccgggtccacgaccaggcaggcgcaagggatgggtcacaaagagcccttgtcgacgagatcgtccgtcgaagagcgggccttggagaaacggtcgttgagggtgaccaacgcttcgcccgagccggaccgggacgaaacggccaactcccgctggggagcgctgaggaacgccgttcagaccgcagctaccttggcgaccagccgcaaggcttccagcgatcagaacgtctcgttcttggacgtcccgtcaacagccaaccaggcgaaccgacctggtcagaccagaacaaactcgagctcgaccatcgaggcgatttctcctgccgtttcgccccagagcatgatgcaggcgggtcatgcggccaaattaccattctttgaaagatacaagaagatggcagagaattcgaatggtgcaacctcgatggtcaggcaaatctcgattaaggaggaccggaagctagggaatccctcctcggcaaaatcaaacccagctctggacgctgtcggtgaggactcgtacgtgatgagcgaatctccttcaaggttcggttttaatgagcgggaagacgggtcgactttgccatggctacgaggcggaagcgagacgtcgagctcggaccgacgcatggagccgtttcccgcgcagccgttctcagatgcgagcttgtcgtcaaacgactctacgtcggagagcaaggccagagcaggtgatctcgccatcatcacgcctagtgcgagcatgaatcaactcgatgggatcgccatgggcacccgcggtcgacatcagcctcctcttcatgtgcgggaagcgtccggagaagacggcgagttgattgaaggattgatcgacgagctgaagacggatctggaccgattcggtatgccctctccgaacatgagcgtcgatcgaaagacggaacgcgaatcgtaccagtcttcactgctcgctccgtcggacagcatctctacacccggtctggaccttcaccggcggaggagcgattcgaccaagctggcacaggccgtcccggggaaaaaggcttgccagaaatgcggcgtgagcctgaaaggtcggagatacgtgaagagggacgggatcgtgttgtgcgaagcggactggaaggaaatgttcctccccaaggtaagctgctgtcgttttacaagctgtcttcgttttgtgtagctaggattgacagaagtgataacatcgcagtgccgacggtgtgcgctaccgatcgagacctctgccatctcttcctcagacggacagttgaaggggaaatggcatcgcgagtgcttcacgtgccacgagtgcgatcagccgttcagcggagagagcttttacgtgtttggtgacaagccgtattgtcaattgcattaccatcgactaaagtaagtgaatactcgtcccacttggatgccgttcatcgatacttatgaacggtattcgcagtggcacgttatgcgctgcgatcacgtgtcagctccccatcgagggcccgtgcctgttgacttcgggcaactcgcgatatcaccctgggcatttacattgcgatcaccgggataggaacggcaactattcctgccgcaacccgatggaagattattacgaggtagccacgatgaaggtttgcgaacgacacaaggatgaagcgctgcgggtaatgaaccggatggccgggaaacgggacgctgcgggaaggatgagcgtcgcagccaaggcagagaagaggcgaacgcggttgattcagatgtgagctgatggtcatggacgatagtagtagactatataccttgtactattcttgcacttcataatttccatcatcaccttgccttagagccttatgtggagtagattgtgttcgccgagtggctttttccccattttcggtcaaatccgatgagatcgcggggggatcgcatggagttcatcgaaagaaaggggaaagggggatcgggaaaatgtaccaccaacgccgtatacgtatgacttgatctgttggttcataatactcgcagcactactacttctgcaattgtacgactggcgactgcatcgtgctttataattcatagaccttgccaagtgcagcaggttggaacctctttcagcgataccaataatcaagtaattcagcgtgcatagagtaccggcatacctcgcgccaaatatacaggaaagaaaaaaagtttacctcacaccgtcatggtcaaattgaagactcacggccgaaacggcggtgaatcggctatagtcgatgcaacagcacctgcctccaagaagcatggagacaaggactggatggcctcggacaaggacgccgctgccatacccgaaaacaatatgtggctcgtcgtcccatctctgatgctcgtcatgttccttgccgcgctcgatcagacgatcgtgaccaccgctctgccgacaatagcgagtcacttcaacgcaactcgtaagtgattcttagtgggtgtgttcagagctgttttgacggcctgtgttctggaatatagctggggagtattcatgggtaggcacgtcctacctcttggtggcaactatcatggtaccatgctggggtcgaggtaagcagcgcctttttttgcaccgaactctattctttactgacatgacttatcagtctcgtaagctctacatgattcccgcccggccaaaacagagaccagaactgaaaacgacgcgtcttgtgttgaatagtgatatcgttggccgcaagaccctcatgattccaggaatctttgcctttctcatcggttcaggtaagcaagccttcgcccgacccttttacaagtcgagcgtttcacacatcttgctaaaacggagcctcatatcatcaatcgcacagcactctgtggtgcggcaaaatccatgacctggttgatcggggcaagggctatgcaagggttcgggggtggttcgatcatcagcctgacgcagatcatcattggggatatcgtcccactacacaaacgaggggtaagtcgcgagctggttctgcgtcggtgactagatccgtgagacacggtggttgatcgattggaacgatcgataggctacaaactcgtggacgggatcaatttggggaatgtgagcgaaactgaccgggtctagctcgcaacatacatgaagctgacatcgatgcaacacagcgcatctgtaatgggtccactatttggaggcttgatttgcgagcggaccagctggaggtggatcttcttcatcaacctccctgcatgcggtcttgccatcccggcgctatacttcagcctgaaccttccgccaaggaagaagacgacatggagcgagctttcaaagacgttcgactttattggtctcgtcctcatcatgtccggatgcgcttgcctagtcgtcggattctccagcgcgagtgacaacggctggggtcagaaacagaccattgccctcctcgtggtcggcttcgtcctgttcgtcgctagtctggtgaacttcatgattaccaagcgcaacgccattgtgccgccacgactcttgaggacgaggacgaccgtcttttggttgctttgcagtacgctgcacgcgaccgcattcttgtcggcttccttctacttcccggtattttaccagggaattgagaatgccagcccactcatgagcggagtgagcaaagtcacgagtccaggtcaccacgtgtgctaatacctctcctgacataggtctatgttttgccattttctctggtcgtttcgatcggtaccagtatgtctatattcaatcatcgattacgaggcggatcacatgctgaccggtccggttcttcctagtcatcgctggtcagctcaatactcggctcaggatcgtccgcccagtcgtttgggccggatacgcgatttccgcacttggctatgggctttgcatcaagtaccttcagtatggtggagggatcgccaatcagattgtgattttggtcgtccttggactcggtgttggattgtcattggcggtgccccttctttgtctacaagcggtaagctatgatggctcgtcgttgtcgctctaccatgactgacagtttgatatgcatgtcttcaggctatgccattgaaagaaatggccgcatccacctcggcatggctgctcactcgatccctagggggtacgttgggtattgccatcttccaggcggtcattactaccgggctagaatctcgattcccaaaattggaaggctacggtacccaattcggcatccccagggatctcgaggggtaccaccagctgcatgacctgccagaggggcctacgagagacgctgcgttgttcgccttttccgattctcttagggtacggtcaaggggggcaacattcgagtcgcagaacaactctgatcatcctcttgtcttgtccgtagctcttgtggatcatctggacgcccatgatgggagtggccttgatagtaagtcggaacaacttggaccacaactgcctgcagaacgctaacgaccctatgcagatgtcgctttggacgcgaacatataccctggatcgactgccaggccagcagacggcgactccaacagagaccgataccaaagtcgatgaagacctggagaaaggcccgctggattcaagcgagagcggtacagtcacaggcgataggctagatagggagcctagaccagcggaagtagaagaagagattaaaaagcaagggactgtcttagacccaacggcaccagctggccagccattcgcagacgatgcagtcaaaagtaggaccaagtaatgaacaagttggacaattcgctcataatgggtatgcgatgtattacaacgatgatgatgataatctttctggctggcgaattaagatgctgctcggagctgctgtttcgtatcagaggaacttggtgatggcggctgggataccggcataagggaatgccctcctcctcgtcttctctgccatgctagccatggccatgatgatccagtgaacctcgtcctccatgagaaccggtttggcatccggcccagttccgccgacctggatcctgagcttgcccttcttgaagctgacactcccgttctcgagccataccccgacccatttaccggtaacgtgatccacgatcttgtaattgtaatatgccatcctcgctgcagctcccttgacaccgtcctctttagccgatgtgcggacgacgtcgaacacccgcttgtcgtttccacgaggaatcgtgagcgtatatttggcgtaggtgagggtgtccttggtggtcatagaggcattttgtcctttcactccggcatttgtaccatcacccccgaggtacatctcgatgtcccgctttaagcgaaagtgactcgtgcccacgattgggccgtccttagccctgtccctgagaacgacatcgggagcgtccttgatttcggacatctcggcaaagtagcggaccttgccgaaggagtcgagtacggagatattggtcgtcatgtatccagcgtatctgaactggagctcgaggctgtcgttcccttgtagcaaggtagcggcgtttggatcgctcccaaagacttcgtcatacgaaggtagatcttcatccttcgagtccacgtggtctgagggtcctgctttggcagatgtatacatgggacgatgtggtcgtgtttacgtggaacgaagcaaagtgtgatttattgatctagggcaccgctgcaaaggggacgactattgacgagacctcactgcaagttgattctccacctatatagttgagaagcacagcagaaggccgagatgatcgttcaaccgttcggcaacatcatagggtaacaacgtggatacaagggccaagccttttagcgcccggatctgtcccggtgccgtgtcgaccggcgccgagacttcgcatccctactaccctacaattcccgcttccctttcacttccccaactatcccttacacgtcccaattctcgcaaaacatgaacaaccccggtcccctcggaaacatccgcaaagacctctaccgcgtcggcggcgtcctgctggtagttctcaaatgtcggcacaccttgttgatgcatccttgaaccaatctcgtatggcatgggctgtgttacgatactcgggtatgcaagcagaccatgcctcagtggtatcagcatgatgtcgatctcgaaaggtcgtcccggctgaagattcggtcccggtcaactttcctcgctgggtaaatgcggctcggttgagttcgggctcacctctgcaagataagaacctctctttgatccggcaacaagccacgactccttgtccgtaatgatgtcgtacatcatcgggactggcttctcatctggatcggtagaccatgctgtagacgtctctatccgggttcggacgtcgataggctctccgactcgataagtggtatccgcagatgggaatgttagcgaggactgcgaaattatctgattcgggagacagtcagtatcagttgcaatcgctatacggaggcccgacccaagcgttacctgcatcggcgggacctcgacgggtattgtcagggatcgccagatctgcgctgctgtttcgaaaccaaatgttagtccctcgcgaggcggactcctttattgtgagccatccccactaaccatcacattcaagctggtacgacagcaccaagcgcaacagtctatcttgcgaaccggtatgagttttacgctgagtgatcttgaaaacataaggtacgggcgaatccgcagtgacggtctgatgaacgagacgtcggatcagcttgcgatcgaacatacgcgcgagagcgatctgcgcacccactctttgcatctcgccagcggcgaatggactgacgaccagtgcgccttgatccgtcgtcacaacagccgaacgcgtcttgattgagccatgccccgccgcggaaacggtgaatttagagatcaaactgaccattgctcggtcagttactatcaaagcgcgcgacggccatcttagctcaccagtcaggtcggaaaaagtcttgaacattaactgctagtggaagcgcgaggttgagtctctgcgaggttctatacagtcgtttgacgtccgcctgatccactgtcctgtagtcgatagcgagagagacctgcggatagcttcagtaacctatgctccggcaaggcgctggccgtcgagctgactcactacgacttcatcgctccttgcctcggtcgcataaggaacggatatcacgagttcgctggctggatcgataccactgagtacgattccctgaggcgatgattgcaaggctggcaatggacaatatcggctccaattagccgacaagcacgtcggcgggtttctttcgcgactcacttcgcgatccgagggttgtcgctccggagtagtaaaaaacgacgccgcccgtgtctgccatcaacttgatagcgacgtctcgaattcgatttcgtcccgaatgaatggtcaaattcaatctgggctcggattcgagcgagactgtgaagttttgaagggattttcagacgtcaggtgaatgcgaggtgccgtgtggatagaggcacgtctcggaactcgccttccaaaggtacatccaaattggccctgaaagcctcgccatcgtttggtatccgtacgattctccttgccaccgttgacgtgtcggttttacttccatactcgaacgataaacgccccaaggtgatttttctcaatcctagggtgaagacacccgacaacggcatctgcaagtgaaattaattgtatgagctcaaggtcttccgttatgccaatataagaggatgctgactagactcgtcagaacaacctcgttgtcaccctcgaccaagatttcgctatccgaggcaaaccaaacgtctcgctgcccaggtcctacaaggcatacttgtacgcaatctacttcgaccgacgatggcgccagatttttcacgcttaaacgaatcttcgaaccgtcgaccgtctgcagcggctcagcgacatgtgaacgcagtcctaattcaaagatgggatgctcaaacacgtcgatacctaccaacatgcgatcagttgatggcggaatgctcggttagcgttcatgtctcaccttgttgcggaccaatctggttgaatcgatccactgcttcgaggatacgaccggttgcatccagacatgatgtcttgccgtcatcttgattccaagtgccactcgatgccggtatgagactgagatactctaggccgagcattatgaatgccttgtcaaccgatgtgcccagacggtcatggcattcgacagcacgggccaacgctcgcatccggatactaatccatgcagggccagccatgccagcctgtcgcgcttcgtctgataggtaatcttggcaaagctcgacgtagacatctttagcagattcgagctcgccgcgatggctgaagcagcaagcaacgtcagctgaattgtcaaacaaagcatgcttcaactcactaggcaacttccgctactcgctcatcaaggctgaaccggactcggaccctcccgcttccccgctcgaccgattttgcgttttccagatgcgtgttatagcgtctaaagaattcctctctgtcgctggccacgactagcagatctctcatcgcggtcgacaccgcttcttgcatcctcggtgtctctgccacaatgggtgaagctggcacatcgaatagaatcgagtccttttgcggtaacaactgggaagactggaggaaaggatatgcgtgggggaagatgccagttttgagaccaattctgtccatctatacccggcaaccaagaaagacgagcttttattgcataatcgagagcaaacagattccagattttactgacctgtagaatcgctactttcaacagttctcccctgcccgccaggaagaccttttcttcggtttccgatacttcctttgccgctgctacacctgggtagcactttgcttctatcgtttggcatatcgcatctaattctaccaccgagtcataaataaaagcctcgatgacgtcggtcatgttggaggcctgtaagatgattattcaggatgcacatcagcacctagcactctctaccggattctgatacgacgcacggaattttctctgagccaccggcccatactcaggatccatttcatccccctctcaactatctggatagcattcgctttcccgcccagcgtggttactcccatctcaaagctattgagaaggatctcaacctgccgccggaacaggtatacattgtagtcgtatatcgtatacgcagctgatggtggcgcaaatcgggccggtgtcgagcttgtggatgggaacaaggggcctgagaccgttgcgatcttgtcggtgcccgttcgcccgacaaaggccgaggtgtctgcttgcgttgagtcaggtgagtctacatcatacaccttgcgctacccatagacttacctctggccacctgtgccatggaagcctccagctcgtcgtaggttaaaagcgcatcctcaaagagactcatcctctcgtacgtcaacgccagcgattctttgaaaccaaagaacttggtccagttccagcctccactgcccccgggtactcgcatcaatgcctccccctttctgaccgtatcttcccgctcccggacgatatcatccagcgctccaatgattgattctttgagcgcctgcgtgaggtccaggaagagagtaggatctgcgcccgatgtcttttgagaggctgaagggtgtgtcggtaccggcagcgagataacccgggtgatgggggaggagagcgttccagccagattggtcgatgacagagtagccttgtcagtcgtcgacgtcaagatgccgaaatccgacttgagcttggataggataccggctgcggtactgcctgtagctgctgagcgtagattcgtaaacattcccccggcacctttgctggaatcggaagcctgagcattggcacccgatgtcgcattattgaccaacacgatgagattctgagcatgagactgatgggctggaggaagggatgctatccatgaggtgatatatggtcgcacggacgacttgtaggcctcgttgtcctgcaaatgaatctggtcagcgaccgtgaacccccgagtcatacgctcgacttgcctcgcattctacgaaacacatgtgcaccagactcccttcgaccagactacctgtctcgacatctctgggcagcttgaatccctgctctctcgtctgaacgtctacgagcttgtgcagcctgacatcacattgctgcacggtccttacagaaggcttggtcgccgacttccagtgaaaattcctgagcgggaattgtgagttgagagaagataggatgtacggaaggtgccggagtgaggtcggcgtcgaggtataggtcacgttgataggatggtcgtcgggcatctttgcggtcgtcttggtcattatggcattgagcctcgtcctgtgcgtagtatctagctgtgccacatcggaactctgggtctgggtcgagtcacttcgtgtgacgcttgatcgcacgcaacccgtaatgctttgggagcaagatatagaaggtgggttgtgatcaagcagcacgaatccaaagacctagctggtagctggttgaatgacgattgcgcatgagtttgcttccgaccatatattgtcaacgggactctcttttgaccgttcaatcataagcgcataggatataggatcagatgaccgcaatcacaggttcttgaaggggtcaaatgtgaacaagtcgagtgtcaaattggctgaggtagactaaatgtgaccggggtctgctcaatcccttcgccttcctacgtcaatttttggctgccgttcgtgcatcagggtcaacccggtcggtctacccccgagcagaatcgacgctcgacgtaacatatcctgcatctagaacaagatcatcggatcgatccgaccagccggtcaacaagactcgagggccgaccgtgtaaatatcaaatatcaaaacaactacaggaaagaaaatgaaagggaaaaagcagaacggagcagacgttgtgatgaagaaaggtagatatcgttgactcggatttatttgccttgaacactgtacaacaaaccggaataatcgtcagccttgatctcgacaagctactcgccagtacagtgccgttcgaggaccactcacgctttgacgatgggcacgacaatgacgatgatcaaaatgcagataccgaccccgacgatgatcctccacttcatgtccttccacctatggaagcatctcggtcagtcgaggtgccatcgtgcgacaaggacagaggatgggggaaagacgtaccacatctgcttcctgaccctgttagcacctcgtcggaacccttgtgccgagacggcgagatcatctaagagcaacaagacacgtcgagtccttttcagcccgtttgctctgccttgatgagagcatgccattcgcctccccccttccgtctacgtcctcataattggcaaggccatcgcagacgaaagataacaaagaacgctgtgtgacatcgagactcaccgctcttgtctcgaagagtgtcgaggttggctccccgctcggtcaccttgttgatgttatccctcatgatcccgacggtcgagtcgatctcggcttgcaaggcagcggtctgcactcgatgcgcgcgattccgatagatgcgtatgcaattcgaaatgatcaccatgacgagtcgggaaacgaatggaggggacaagtatgagcgaggtttaccggttgggcgatgttgcgaagcgcaagacctcgaccggacacactgaccctctgatcaccctgtctcgctacacctccagcaggcccggaaccgctaccccccggtgcggagccgccggcggggatataagggtcataaggttggctatcgcccgagttctcgtaagggttgttcgacctagatggcccggcgagataggtgaacgaagaaagagatgacgagtattcaaggtcccagtccgattaaggtcaggtagaccggtgaatgatcgaagtggtttgcaagatcgtcgtcggccgtcccagaaaaatcgatagggaaggagatccgagattacgcatagagttggtcaagagaaatgaggcatgttgttgacaagtaagcgatattgtatttcgctcggatcacgcccagatagtcggacgtacatggtgctaggatgacttgcagggaaacgggacaaaagacgattgaggaccttgtcactagctcactagaagagtcgaggttcgaatggtgagggttgaacaaaggatatgtttgatggtctccttcgctcgagtaacggtggaacggtcggctggcacagcaaacgacaagctcggcagcaactacctacgaggcgaggaagggaacgaacggatgctgatcctttgaatgccggcattagtcaagccattacggcaactaaagtcacccgcgagtcttaggtcaagtgggaaaggaaccgaatcgagattgtgatcgtcatcggtctgaaagcagcgcactttgtcaacaagctcatctatcatcgagatgatcggcgggtgcccagagccagcaggctttaccatccattcagcatgatcgttcaacatgccaacgttcaggagctcaggttcagcctcgagtgacatcgaagatccaggcagacgcctcaccgggtatcatcatcgaaatcccgtctagtaggccattttgcatcagacggccgcgtccatgtttcttgaatgttaatacatgatctacctcgatatcccagatcgatccataacgctatttcacaaggatgaccaaatcaaagacgcaaccttctcagaaggccagagtcctgtactggttcaggacagacctacgtgtgcacgattcaccagcactacaggcggcactcgccctcgagcaggaagtagggatcgaggcgttctacccggtgagtcgtccagcggtcgaacaaccggctccaccgacccgcctgacaaatgcaatctccctttcctaggtgtggtgttttgacccgcagtgagcatgatcctcatcaagggcgtttaagccgcggacagtactgagaaccgcttgtcgacccaccttaccagatacgtctggaagcatcgagtcggagtgaacaggttcgctgctgccccctgacccggcatcgtcgtaatcaatcgctcataagaacagtctcttgttttcacatactacagatggaactttcttctagactccatgtccgacctctcgtccgctttgaccaagctcaacccgaaacaaaaactgctggtattgcggggcagtcccgaaaaggttcttccgctggtttttagagaatggggtatcacacacctcgtctttgaaaaggtatgtcgtccgactcttccctgcacatgtcacaggcgaacctttggagggctgacctgtcagtataacgtggtctcttcttggacaggacacggcagcttatgcgagacagagagacgaattgatcggggcactggtgaaagaatcattcccggatatcaagatcatcgtcaagcacggtcacaacctgtatgatcccgaagaggttgtgaaaaaggggaacgcggggaaagccatcacgacgttgatgagctggaaaaaggtgagcgtcgagcgtttcccctgtgtggtaacgaggtcatcatcgcagtgaataggaagctgatggtaccccatttaatgttttccgtaggccgcagctaaagtagcagatgctccagcccgaccattacccactcctacctcgcttcccgatccaggaagtacttcgatagaccccagtcatgcggacatgaactcgctggaaaagatcaaggaggaaaaccccacttctatccgacgcgctaataagccggtcaaggaggagggaacgggagatgggaaccctatggaaggaccttttgctaaactcgatggtatcaacgtgaatcgtgagatcatggataacgagaagtttgattgtttcggcaagtctcctggatcgcgcccacgaaacgattacatgcagacgacctgaccgagacccgtattcatagatacgatcgccggtccagataaggattatgctgtaccgacattcgattctttgggtttggaaaaggccacaacccatatccgaggcggagagaccgaggcattacgccgcctcgaggctttcctgaatgatgccgtaggggtagctacattttccaaaccaaagtcttctccgaacagtctggagccaagtacgactttactcagcccgtacctcaagtttggatgcatgagcgtgagaaagttctactgggattcgcaagacgtttgtgaaaagtatgcaaaggagcacaagggcgcgagtatgaccaaagagccggagaatttggcagggcaggtgggtagcatttagattgtccgagctacgcccgaccgagcaatcaaaactgacaaaagcctcctcagctggaattccgggacatgtactattgtgctgaattcgctactgccaagtatgagcggattcaaggcaactcgctctcaaggtgagttcttgacacttcccgtctggagctcgagctgatgtcgcatttcaggttcatcgcttggaaattgcggaaccagtacgacaaggaaggacaactggtcgaaccgcggccacgcggggaagacgttgacgaagagaggttcttagcttgggtaagtttgcgagtccaacgagaccgatgcaggggccgttaacttggaaaccaaaacagaaagaaggacggacaggtttcccgtaagtacgaagttcgccagtccaccgactggatttctaaatctcggcctggtacaacagctggatcgatgcaatcatgcgtcaacgtgagtctcagatgcctgtacagtcttggtcacatgtgctgatgtggagcatgtcaaacctcaccgctgcttcagtgaagcaagaaggatggattcatcacctggcacgtcattccgtagcctgttacttgacacgcggtcaatgctacatctcctgggaacgaggaaccgaagtctttgacggttcgtccgctgctattctcttttgttgcattagtcaactcattagcggtgactgaacagaatacctcttggattgggatcctggtaagtctcaataattcgcttagcagcgccggaactaatgccgaaaataacgcccctcagcatcaaacccgggtaactggatgtggttgagctgctcggcattcttctcgcaatattgtaaatcgatgggaacgttctgacgccgtttacggcgctaatacctacctgatcgacagtcagagtatacggactcgaatctttcccctcaaaaaccgacaagaagggagactatgtgcggaaatactgtgagcatcactacggggtgttagaagtcgtcaacccagtattgagccatcgcgccgaaaccgcaggtcccgagttggcaaagttcccggacaaggtgaatattttctcgtcgatcagtcgaacagcttccttatgccaactcactcgaaaccttcgttgcagttcatatacaacccctcttcagcccctctctccgttcaggacaaagctgggtgtattatcggacaggactaccccgagccgatcttggatgagcagaaggagaaggcacgttgcattgctcgactgaaggtggcgtttgaggtcgggcttcatgggaactcgccagaagtcatggagggcacggctgaagagaagttgaaggcgcggttcagggaaaagaacggacgggacgaggatgaagacgacgaagccccgtcgacccctaagaaacggaagaacgcgccagtggaaaacggacctatggacaagtttttgaagaaatccaagaaggaagacgcatgacaaattgtaaacagctcgacaaaatcgattgcgatatttataaccatcgcttgtgcctgatctcgactacccatttgaaacgctctggtctgcgttccgaaagcgtccgcaccgcgggatcgcgtgggaaacgtcatgacgcggtcgcgaatcggccagccagcgagatacgccgaccctatccgtcgtcggttgacgtagatcacgatagtgttctaccatatcattcagacgatatactctcgacaggtcacaaggaaacactaccgatcattcacttctcgaattcctttccattctccagaatctcctaaaaaatggtgggtagtctagtctcgctcgacgtgcccaacctgaactcatcagcccacgcgtgcttttgtttacttctgatcgatggtacggatagtcttccggaatcaagcctgtaagtgtctcttgatttggatcggccggtggccggagcaggctgttgatatcaaaacaatatgactgcaggacgagacctgcctcaaggcctacgacgagctcaagctcggcaagaagcacaagtttatcatctactctatcgcttctgactcgaagagcatcacgaccgtcaagcaggcaaccttggaggagggcaaggagtgggagacctttgtcgagcagttgccagagaaggagtgccgatggggagtgtacgacttggagtacgaccagggtgagggaaagaggaacaagctgtgcttcgtcatgtggtgagtacacagccttcctttctgtctcggtgacccgccaaggattgacggcctgtgtgtcactttgcattcctcgtcttgtgctaggtcccccgatgatgctccgatccgtcagaagatgatgtacgccagcagcaaggacgccatcaggaagcagctcgtcggcatttcgaccgagatccaggctaccagctacgacgagatcacctatgagagcggtgcgctacaactcttgccgttgtcattgcccgtgcttagactaagcagctgacatctgggaacctgttacagttatggacagggctgcccgtcgttaaattctgagacgtcgatcactccaggtgcaagccaaatttccaggtaaaagccgcgcttgtaacgatcatttccgtgtcccgttaactgacgggctttcatcacaggatgcacagtctataccaaccgatcacggatacgtctggccaccgcagtcgatcgctacccagtgtcaattctccaccttgtcgaacatgtttctcgacggcatggttttcttttcccttgatcactccgcatttccgagccgatcttgcttgtatcgatgaagcagatgattatgtgggatttcctatcagctactggaaactcatgcatatacgttcggcggatgggcttttcagttgcgcagatacgcgacaggagtctcgaaatgctaacaagatgtgggaaagatcgggtcttatggaggttcatcctcgttgtccgaccaggagcaggtccccgcacaactgactcgcggacggcccactgcttcggtgcacacatgatttgatgttcaaggcacagccacaactcgactgatcacagcaagtcgaatcgaacatcgcccaccgactccggacctcaatcgaccttggtcttttccgcattcttggactcggcgtgtcttgcttggaccctgctggtaagcgcatcgatttgggcaaattgatgtttgaagtcggtagggtaaaggaacggtcgaagatcgaaccctaagtcataaggcgatgtcagtatcactaggccgactttttggcgccgtgaccgcttacgattgtcgtccggcgagtatccctcctgtaaacagaaaatgggcgatcagtggtccgtatgaccggcagtctgcgtcgctatatgagctcaccatgtgtactgatggagtcaaagtggtcctgaagacggggaaccgattcagtcggccgtagtctcgctgacagtatttcctacttacatcttgtgcctgtttcgagcgtactcgaagaagaagtgcttgacctttcgagcgatctgttgcactcgtcaagcatcagctatcaggtagcatgaacgattccagagtctatgtgctcacctcctctgggggaagcctgttgccccattcctggagcagcttggtgtacattgcgaaaggaccacatttctccaccttcctcatcctgccgaacaccgacagctcatcatacgtcatgcccatgtcgatctgcaaggtgaacgtcagacggccgaatccgtactattcgcatcaagtgagacgcgcacctcgtcggattgcacgtaagtgtccgagaatggctcgagctcggcagtaggaaccgcatccaagaatctaaagtcgagttgtcagtacgcacaaggtagacgagccggcgacaagagggacgtactcggtgagtaccgggagatccatgttatctcgagtccaggcgatgaactttttgagatccgttttgctaataccaccgatagggttgacgtccgcgcttgagcagctgtgaaccgagacatggtggtcagctgccatcgtgctgcataggcaatggcaagacttgctcgtatttggtgtagtatcctcgaagactgcggatgaccaaaataggtcagtaacgtgctgagcaacaaatttccatatgctgacgtacctttcatcgacgttggcactcccaagcacgagcaaaccaccaagtttacccctcgaccaaggaagcaactgcgcaaacaggtaggctaacaccatccgcagacgagcctgagggatatcgcgaccgtcaggacgggctgtctaggtatgtgcatgacgagaacaactcgcctggatgttctggagtgccaaattttctgcgttgctaccgccatggaccttgaacttgggcttgtgaccggtgacaaaggcaaaaatgtctcgaacggcggtgacaagcgcatccatgttgaggtcgacgtgatagctgcagggcgacaaaggtcagcccgtttcgaaaaatgcacatatttataaatgtcactcaccttccaaccgcttcagccagatccttggcccgcttcctggttgcaggactagagttctccgtgcccatgtaacacgtgtggaagattcggtttgcaaactctttaggatcagagggaacataaatcgatccaggttcttctccagtgacgcggcgaacatcagcgatcacgatggggtctattcgcaaaggcactctcagcgttcatacggagtcttcagctgatgattgcttggcaacccacctcctttctgacaggcttccacgacgagccgggtcatagagtggatgatacaggctgtggcgcaactgtcgatacctccgctcaacggcaagaagtaaccctgagtccgggatcgccgaaggtagtcccagagccaacatgcggggcccaaggcaatctcctcctcgggcgtgtggtagtggatgtcgcgaatgacagtctctcgcctatcaaagtcgtcgcccaatccaccatcgagacgaagaccttcaacacggatacgttgataggcttcggcttggacggattgcatcctcctgctactctgggttcgatgagctcggacagcttctaagtccagggtggccgaaatgacttcgacatcggacaaggagaactgagacccctgagcgacgattttgccgttgaaagcgatcagaggggaaccatcatagtatagcctgtctccgtcgcaaccttgctggttggcataaaggtagatacctccgagctgagcagacgtgtaagcagacagaaactctctctttttgcgtatcgtcggaagtttaccttgagtgtggcctccttgatgagttcgacacgagtatagagctttctcaactcgtggtgactggcgctcgagttggtgaagatttcaactccgtcgagtcccatcaaagtgtggggcctatccattcaacatattcaggatgtgttgctcgaatcatccaagttggatagcctgacgactcacgaggcaggagtgaataattcctcgcacagctccacaccgatgacggtgtcgtcggtagagaccacagcgtcgccgaaaggtaccaggctctgcgttcgacgtgatgttcagccacaagaacatggcaggcgtttaccagcctacctacctggccggtgatgtcccgaattatccgaggcaacgagtgttcctcgacctttcggtgcttgtcccagggagcaaagtgtcggagctctcgctacgtcgacgatggtgtcagcgcaagccttgcgaccgataccatcgttgccgaggctcacgtaatttccgtcattggccatccacattttgggtcggatcatcaggatttttccgttgtagatgatgactcgacagttgtagttgttgttcttgtgagtcatcggcctgtggagttaccgaagcgagatgagctccacgaggtcacattcgagaagtgaagacattcgaccgacattccaacgtcacaaatgatgtctcgtgtatctggatgagccaggagcttggccaggacttcccatgaatgtcgatgagtatcaactatcgatttcgatatacgtcagaaacatcttcgcccagctcttcaacggcgaaatcggtctcaccctccagaaagtggtccagacatccgtatccggggatctccaattcgggtcctactcggagcatggcgccctgcgctttggcgagctgaatggatcggaggattcgctcatagtttccctgcgagaatgacacgcttagaacggcactgtgagaacaatattgctccaagaggatactcacgtcaaagtccaaggaccactggttcagcgagctgtagtgagtcaaagaatcagccctcgttccactcgtgacgatgatgcatcgagtctcggaaagagcgtgatacttaccagctgttggttaggcacaccgcaaacaaatggttagttaatcggtcgatcgcaagcctgccggtccgtataggactcacgtcgcgacggtaacgagatgcatcttgagtatcaagtcaaaggtctgggggaggtctgcctgcctcttgctctacgaaccggatttgatacaagattgacgggcggtgttgtctgggtctcaatcgcttgtaccactgctgggtgaccagcccatcgatgccccagccctcgctcacgtatcgggaccctcagctcaagattgtcggatgcaaaattctcgaatgacccggaagaaacgtcatactggctaattaagcggacctaccacaagagcaagacttgtgatacacagttcaccggttgtacacacacacagccgtcgttgtgtctgtccttgtggtcgggtttccccaccccgtctacttcgtacgtgacctcgaccttgaccggccgcagatcgaataggcgcatcggaacacgtactcgaccaaccttttgtacgagatactcggcttgcgtttgagcttatttagtcgcaagcgcttgataccatgtccacctcaccggtatgaccatttttcgatggcaagacctgctcgaggtctgatagtgggtcatacccctcctcctagccgattgaccactcgtctatcaaggacggcggtttccccgcactgcggacattggttcgacgagtcagccgggcgttcgggcccagaacgtgcgccagatatgaccatagtcttccttttgtactcggcacattctcgtagcgcatgtggatgtggcgagcttgtccgactgtgcggacatcaagcccaaattagtcagcgatcccggtcttgcatgacgaagttccgtcaggagtggtgacctcaaggagcgcccacggcaggaaacgtttcggacatctttccaccctttcaaagggtcaatcatctctgtactgctagacagttgtacgccagtctcgattgcgtaggcttttttgaacttgctgatcgtgtcgatcgccattcctttgggtgtcttacgaaagtcatagaccgacatgttcgatggtgtcatttatgtttctgtgtcaaactcggtggcaggtaagattgctctagaaaatatttgtagatccgtagacctcgattcgagtcctgtgacaagtatgtgagaaagattaatagaagtcctcgacgcctcgcgcctcgccgccttataggagattggaagaaactcggtcgacaatctcaaacgcgagccagtacgcagctcgcaacgcgtgaggaacatcgccaaacgcgagtcgttcctcgcggccgtggacaattgattttggctcggatgcgattgggttggggggaacatttgagggatatgccgggttggtttatgttatttaagttagtaagattcaatcaaaaggtagatttcaaataaaaagggtttgattatatctggctagatggccgagtggttaaggcgtgtgactcaagcgaaagcttacctgattacaggtcgtgttcccatggcgtaattgccgcgtcggttcgagtccggctctagtcatctctttttgctcttattgcgctgcacttcatatgccttctcatagatagcttttcaagcaatgtcccccttgatgcccgcacggtctcggaattaagtcgatgccctgtgaacggaaatgtgcagtatcgtcggaagatttgtcagacctgtcactgcgtgtgtcctgcctgttgtgcgaggcaatcagaccgagcatcatcctgaaataggtgcgtattcaggcaattactaagcgattctcgctcttctctgtagacagtttatagcatgtcgtgggaacatcgcgtggcagaactgtttcaaagcgaaagggcgcttgtactccgcggattttgctttgatcgattgcagacaagacgacagcagactgtctcgcaaggacaccgtcagctctgtcgcacgggatactgcccaggcgagagtctagacccgggctccggagaggatatcgcgatgacttaaaatcgatgttgtgtaccctttacacaacgcttttcgtgtgctttgcaacgaagggtatcctcaggccaaggggctgctgtacggattatatctggacatgtcacggtaacgcctacaaggaagcggtcaagtggaaaggagataggaagcataaatcatagtaccactctggagtgctgtaatcgtttcgaacgcgctcgaggtcttgttgtcatcccgactcgaagtattaacatcgccctggtaagcaggctcccggggggaaactgaacattccacttgtggtcgatcaacgacacgttcgtctttgcaccagggtcccttcataatggcgagaatactcagcgatccacgtcactctcttcaggaccacaccattaatttggtcacttctttgtgttcaactataattcctccaagtcaagcccgctggacgcacgcgcgaagcattccggggccgctgtggcttctttgcttgtcgcagagtaccgcaagcaattgctgcagcgttcccatcgagtaacgcaatgatgatttttcgttttctagtctcgagtcgagtaggttgtaagaacgagcggtgtacgaaaggcccagaacgacgtcgttggagcatactcgtagatggcgcagcagtcgcaacaccaagcgcggaagaggcggaacaaacagttaagtaaaaccatcgatgggaatacccattgcctctcctacatcctcttccatctaggctcattgccctgattaatcagcgacagttgcatgccgttgattcgagcactgatgtattcgccttgtaccgggaccatccctgttcgaccgaattgttgcgttaccgatggctctcacgcggcagaacgccacacacgaagtatcgtccctcgatctcatctcgtgtggcctgccactacgacgccgaccgaatcgcaagatcgagacaggtatatatgatcattcggcattcattcagagctggcaagagctcggaacgggtttaaacaacttggcggttcgggctttctttcgtgttttactacatattgacaatcttgggaagtgaaatgagatgggaccggaccgtggggacgagagcgtcccgtgagaaggaggaagaagaactgttctgttcgtacacgttcacaaccgaatactacgatgttacccagctggccagggactgaagtgtgccaatcgcctagtgcttcttggcgggaacgctggtagcgttgttaaaggccaacaagttggggctaccctcaccgacgccggtcaagagtcccttgctggacaagctgatgagcaatcccttgagctggttgggcttcaaggtggtgacgaccttgtcgataggtgcgacggccgcggcgggcgaggggagcaaagcctgagcgagtcggggcatggccgagtagacgaccgagtagacgcccgaggacgactcgaccgactggacgcgggcggacccggcgaggatggtctcgatcaaggcggattcggacaaggtggacccggcaatcttgtcaagcttggcgagctctcgagcggtcatgtaggggagagtctcggttccgtagatgctgagcaagtaggcaccgagaccggcgatctgtcgaggtaggtcgctcgaaaggtcagcgggtattgtatcgagccggggcgacgatcagcgactcacgtgaggggtagccatcgaagttcccgagatggtgttgctagtcatgtttccattggtccagacggacaagatgttcaacccgggggcgaagatatcgacacacttgccgaggttgctatcgacgtcgaacgacgcggcacagcacgggggcgagatcagccggggagggttcgacttggacttgacgcgggcgcttacctaaagtacgccctctcgtctcccaaagtcgaagcgccgacggtgatggccttcttggccctggcaggtgaataatcacaagcgtccttgttgtcgttcccggcggcgacggcgaccagggcgacctgggtagccgcgtcgacggcgtcgtccgtggcggtggacttcccacccccgagggacattgagatgactgtgagaaaaagggaaacggcggcggatcagggactgagccggcgagagggggtgacgggtgggatgaccagccactcacctgatcccttgtagttggtctttcccgtagcggcaaactcggcctcggcagccttggccctctgttcagcgtgttcagcggcccacctgatatcatcccggatcgattagccctgggtctatacaggtcatcagctgatcctggactcacgagataccggcgacgactagtaacattcacacgcagagacagtgatatcaatatcatcctcactcatcgcacagaccaccgtaccaggcgcgcagagacttaccgtcactcaaagttcctgacccctggtcggacaagactttgacggcccagaggttgactcccttgtccaccccgtaagctcgagatccgatcgtccccgcacaatgagatccgtgctatccgacgcaaaagacaagcagcgagtcagcccgggaggggtggtctcgatgacgacaaggatgacgacgacaactcacaccattgccatcgtaatccttgctcccactagggatcgtcttgccccacttggctcgtccctggaactcgacgtgcccgacgttgatcccggtatcgacgacgtagacgtcgaccccggcgtccttttccagggcggcggtcgagtagtcgtacctcatcagggtggacagggtcaattggggtcggtgagagatccgcgagagaccccagggggcggatcgttggtgcgtgatgttgtacccatccgaggaagaggccgtcaacaacgacgacgacgacgaggggacggtctcgaggatgctagcactggcactagcgatctgggcagggtggtcgaacgactcggtaccgaaatcgagcgagacgatttgatcgtgctcgacgtactctacctcgggactagcgcggatcaggtcgagggtgtcccgggagaaggatccggcgtacccgtagaacccgtgttgggcgtgagaggtgggctggaagatcttggtgatcccctcgagggcggtcgaggtgaatgactgtgaggtgagggcgaggtaggacgcgatcaaagggaggggggcggggtcgaggacgaggacgaatgagtgatcgatcgactaggcatcaaacggcccccacccaaagacgcctggactcacgctactctcatgcgcggtttgaacgacatcgagatgagtctggatgtttccgagttcgactcccttcttgaggacgacgatgtacttgtcctgaatgatctgtccctcggaggacaagggggcgagatgcggggtggacgctggcaaggcggcgatgatggggaggagagcgacgagcgcggggatggataggatcgaggatggtttcattgtgtaaagaggtgtgtgggttgtgtttgtatgtgtgtgggtgtgtgtagattgtaatgtgacgtcgagtgcgatatgatgatgagacgatatgggtatgatctggggtatataacgaggtcgaggtggtcgctaggttgcgtcagcgctgggcagcgacgacgaggcgatcgaatgacctggagaggcaacgggggaggggtcatcggaagcaaatgactagctgccttgccccgccccctcacccggagaggtgggcttgaccttggggaacgggtcgggggaaggtgaatcgtccgacatcggatccggggaggaaggttgattgtttatggctgatgctgcgtttgtggttgcaggaaggaatcacctgtacccgctcgtacagaggaactttcaagctcaggtccaagctgccaaggtcgtcatcctggaggacacggacatcactcctcgggcgttggacgatctaggtgaggggtcgtgcagggcaaacgccaagagtgaccttgttggccaggacgggctgatctgatccgatgtttctcatccacatccatggcctcgggtcaaacgttgccactcgtcgtgaacagaacacgatgttctgctcgatatgcagcggtacaaggtctaccaatcgcaagtctctcttcgttgctacccgtcatcgctcgtcgtccgcgggtgttgataaagatttacgtcgggctgaccttgcttgctcgttgacttgatagcctggaatacgtttgggcggtcagggattactgagcagggatggtcgtgccgtgatggacctgaaacaagcgacgactgaatgaatttcctctgtttgcaaaccgcggatgttgatgttattattgttccaatttgtttgccctgcctgcgcgcgatctttcccgtgaaattcgacgcgtgagaattctatttttcggggcaaaacgagagtttggggcggaaaagggagagagaaggggagaggaggacgcgagttttggcctcctcaccctgcctgcctggcctcgccccctgcctcctcctcctcctcctccctcctcgccagctcaccatccaaccaaccaaccaaccaaccaacatccctcgacactttccaaaagacatcatccaagtaatcacaccatatcatcacattgtcctgccgccttgagacgtcttcctcggaatcccttttctaccaaaaaaaaaaaccctcccccatacctctcaccatgaccctcatctcccgatccgcctaccgtctctcccgacgagccggccagcaggccaagcaggctcaacgtgtccaggtcgccggactgagcaccgccgcaaaggtcgctcagcaggtccctgccatgttgagggctgacaacagggtcgccaggactttgcccaaggccaaggagggtgagtgtcacagcgacgagcgagggcgcgcagcgaacacggagtggggcgggtttttacggtcgatcctcgatctcggagaggtcgattcgaggacgaccgaggaggagacgagaggtggtcgtacatcgagacggatcagagctgcgaagtcgggcgaaacactggtgatacggtggtcgatctggcaaagcagagcactctcgatctcccgatccacgatgaccattccatcgttcttcgcctctcctcccgccctactctgcccgctttgcctctccctgcatcacacccgaaccgaccatgcgaccatgctaacccaccctcttcgcacccacagtctctgcccgaacctacgccacccccgccgctgcccagatcggtgccatcaagcaagtcatcggagccgtcgtcgacgtccagttcgacactgccgacctccctcccatcctcaacgccttggacgtccaattcgagggcacccagatcgcccccgagggtggaaggttggtgctcgaggtcgctcagcacttgggagagaacacttgtaggtgtatcgccatggagggtacggacggtttggtccgtggacaaaaggtcgtcgataccggggctcctatcaccatccccgtcggacccaagaccctcgggtgagtccccgccgcagtcgtgagcgaccgtaactcgacccgaactgaccgacgtctttttcgtctcggcagtcgaatcatgaacgtcatcggtcaacccattgacaaccgaggccctatcgagggagtcaagatggctcctatccacgccgacgccccttcgttcgtcgaccagtccatcgtccccgagatcttggagaccggaatcaaggtcgtcgacctgttggctccttacgcccgaggtggaaagattggtttgttcggtggtgctggtgtcggaaagaccgtcttgattcaaggtgcgtggcgggcgcggcatcccgaatgcgagcggaaggaagctgacaagactttggacgccgacagagcttatcaacaacatcgccaaggcccacggaggttactcggttttcaccggtgtcggtgagcgaacccgagagggtaacgatttgtaccacgaggtcagtctcgcccgtgtttccgcgccttgtgcgtacttcccgcccatgctgacgacgatgacgacgatgcccggcgcagatgagggagactggtgtcatcaacctcgacggtgactccaaggtcgccttggtctttggtcagatgaacgagcccccaggtgcccgtgcccgtgtcgccttgaccggtttgaccatcgccgagtacttccgtgatgaggagggtcaggacgtcttgttgttcatcgacaacattttccgattcacccaggccggttccgaggtgtctgcccttttgggacgtatcccctcggccgtcggttaccagcccaccttgtccaccgacatgggtaccatgcaggagcgtattaccaccaccaagaagggttccatcacttcggtccaggccgtctacgtgcccgccgacgatttgaccgatcccgccccggccaccactttcgcccatttggacgccaccaccgtcttgtcccgaggaatcgccgagttgggtatctaccccgccgtcgaccccctcgactccaagtcccgtatgttggacccccgagtcgtcggacaggagcactacgacattgccaccaaggtccagcagatcttgcaaaactacaagtcgttgcaggatatcattgccattttgggtatggacgagttgtccgaggaggacaagcttaccgttgagcgtgcccgaaagatccagaggtgagaggcgtctccgtcgtacctgcatgcgcgcaacgcgtcagagagctgatcccgttgttgtttctcgcgcacgtgtaggttcatgtcgcagcccttcgccgtcgcccaggtctttaccggtatcgagggtcgtctcgtctcgttgaaggacaccatcgccgccttcaaggagatcttgaacggagaccacgacgctctccccgagtctgctttctacagtcagtatcggcgccggccgtccctcgtcgcttgtctcccacccccgtgcgatcaatactgacgttctctttgctctcacagtggtcggaggtatcgatgacgtcaaggccaaggcccaggagttgcagcgacagatggccgcctagagtgggaatcgctaaaagtcacggagaagaggagaggacacgaggaggaagaagaggaggggaaactccctcccccatccaaccaccctctcgtgtcaacccctcgatttgagatctttttgtgtgtgctggaaacccatcctagagtagaatgaagaatgaatgaaaatgagtgatttatcgtctttgcgggtacgcctgtcgtcgccgtcgttgtcgtactctggcgtgatgtgcgactcgaggcgcaagcaaggaccggtcttggtctggtcaagcgatgcaggacaggtgttttgcgataggatgggcttgtcatgttccaaagaagaacatgtcctggacctggctagttcgacggagcaataccgcttcacgccctgctgccttggccgacaaggtcggtatgcgctgaacaagcaagataacggggatgctcgaaggctgaagtgggaacaagccacttggttgtgatgcccacatgctgttaaataaaatatcaacgtttatgattgccatcaaggctctagccagcacctccttgaccgcgggaagctccaaaatcgagtcaggtttaaagatcatcatatggtaagcaatctcggcccgttcacccgaacctttcccaatatcaaggcggtagtgacgctgagtcatctggctaagagacgaatcaagccttggatgtgagactaagaagcacgactcgagaatcgcaaccacgaaacgtgagggcctctaccagagcttcgtaaggaagggacatcgtcttgcaagtcggatccgtttgacggtcaggcagaattgttggactcgtcaatgctccacaaagggaggcggatctgatctgcgggcgtttttgtttattcttgaattcttgtttgactcgtaacaagatacatatacctcgtttccagcctccaaaccgttcaggcttcaatcctcctcctcctcctcttcctctttgtgtgcgttgttgtctagtaacagctctcccgagacgatcagaggtagggtatacgtcgacatctgctatttccgggcatgcgcagtatgaacgttctcaactagtctcactggaaaccttggcacgtcgtagttcagtcgtgtcaataaattcaccatagaacacatgcgtacattcagaacatgacgacctttggcttcttgggcgggaccctagctgctaccggtcgcttaggagcggcttgcttgacctcgacctgttgcgctggcttggtcattgtcgtcgcgggtaccgatttgatgacgggcgcgaccctgacgtccctattggcctccagctcggggttccccgtcatccctcccgtctcaccggcaatctccctcgtctgtcgctcaaagtcccgtttctccttgatcttcttggcgagcttttgggccttgtcgatggcgcgtttttcggccacctttttctcgagctcgacgcgtttccgcttgacgaccatgaaatcgtcctcgtccgctcccgcaccactgccggtaccgaacacgacgccgttattttcgtctccgagggccttgagttcctcgttatagttgtcctcgccctcggtgggctttttgcctcgcttatcatccgggcaatcgctcgcccggtggtcgaccttgccacagactttacagcttccaccgttggggtagacgcctcggtcgttttgagggcatttcgaagcgaggtggcccttttgcaagcagatgaagcaggatgcaaaggggagaccgaccgatggtggtttagggcatcgtgacagaggatgttgtgtcgaatcgcaactgttcaacggaccgacgagaggaatgagttgcgtgcctctctcgattggacggtatggttgacgggctcaccggtaacatctcccgccggctccagccacatcactacccatttggcccttgcctcgcttcatacccctcttgggcgcatccgctggggcctcgccctccagctcggtcgactgagcagccaagaggacgttgggacattccctggcggcgtggcccttggaacgacaggcgaaacagacggtggaagagttcttgttctcgatccgtccgacacgacgttgttcggtccgttcggccttgcctggtagtcaggaaaaagggacaaggcgcagtcagctgtggctctgaggtttggcagaaagcacacgagctcacgtttgatatcgtcgttcttcccccacccaccggtcctaccgttggcattaccctcctcgccccattcatcctttcgcttcctcttcctgtcaccaccgtcggtttcgtccccaccctttcgacgttgtgcgtcttctgaagactcggcctgggatgcatcgtcacccgtggctcgtccggtgagctcgtcccaggtagaggcggtgttgccctttttagggaacccaaaggcggtcactcgggtcatcttggcgttatcgatacggggtaatttcgtgagcggttggtgcgggagaatttgagcaagataagatcggtttgaaatctgtatcgttgaccaggctagatagtatatagtaaagctagtagctagtatacggtacgttatggattagtacacggtatatgattgccatcacccagcttgcaaacacgaccctgaacctccactttgtcaacttttgcgattctcggcgccggacattttatttatttggtgaaaatgcggaaacaaatcttattggcgacttctgcaatcatctgcttcacgtacagggtttcaacgaggcgggccccgtcggcaaatcgaccgtaatcgagttttggatcgtactgatccggtcgagatgttcattgaacgattctcgaacactgaagtagaaggaagccggtcgactgtcttagcaatcaggatcgtcagtgccggacctccaccagggggaaagattggtctatagtaaccaagtgcgccggggcggaccgatgggttcgtgaggcaccacctgggatgtcctgtacatggcagtgcctcgagcagtgcatctccgagaaaaagttcgtgattgagcgacagacacgagctacccagcctgaacgagggcgcacgaggtctcgagggtataggaaatctatccttcttgtctgaacacgaattttcattcctcaaatgctgtagacagacgcagtgatctcggtgattagcaatcccgaatcgcaggggccatctgttgagtagaacgggccctatcatgacgtcgatgatgatcaatccgccgtccgacagcaatgtcaagaccgcatcatcttgtcatctcggccgcactcttgatcgacgatacgcttggctgtcgaccggttattttccgttcgttcaacccgctgcgatcgacctcgcatcaaattattattattgtggtcgttgtctgagccggggaaatatccaggagaccgatctttggaccgagaaccgagtcgccgtttccccgtctttcctacttttcgtttcccatacgcgcgggtggggtttcgctttaatcacggtcacggttgggcgaaacacggcgggtccagtcatcatcgttccagacccgggtacgggatatggatcatgtaaatgatatgatgccgtcaatctaatcttcatcattacggcatcggaacccacgctggacggtggccagcctggtagataaccgagttccgagtcgagacggatttctcggaagcgaaagagaagggagcccagctgtgcgtgcgtgcgcgcgtgcatgtttctgcgcgttgattgtgattgttgtgagacttgcggatataaatctgtttccgcgtcagtcaccgcgagggcgaagggcagacagcgagggaggaggcaggcaggcaggcaggggcagagggagggacagggaagtgatcggggtcggtatcgtatcccgttcaagctaccgctaccaaccaatcaaccagccaaccaacctccacccagacctcacactccggtctcctctctctcttgaccatcggcaaacgtcatccgcacagacctcggtcaacatcctactcgtaactggctacctcggacattgtgtcccaagtcggttacactaccagtcgtcagtgtaactcagaagtcaatcgtcaacaatacggtgatcccaacgtttcaacagtctttgacactcacaatcgacgatcctcactacctgcccgtcactcgtcgttgacaatctcccggttggggaagcgctagctaccatgtccgccgaccacgtccatcttggcctgggggcagccatcacatcatcctctcaagaccctgatcgcagtcgactgcgggatcacgcacagcctaccatccgcacggacgaccccggatcgatcagcggacccacgggcatgtccacagcattgttacaaggtgcttcagaggagaggatcaagatcgagcaacagatcgaggtcgggaaagcattgtctgcagatttgcaaaagggagctacggttcatgtgagcccccccccccctcctatccctccgtccgtgttgctgtccctcgttactgatcacacgagactcgtccgttcgtacgcacggatatagacgttcgacccggatgcgaccaccgagcagaaagcgagggaagtcgctggggtaggttccgctacgatgggagttggacctagttcgagttctgccagggcgttggtcatggatacgaccccggcgtcggctctccctgcgcctacgctcgtcatggacgatatcaaccgggcttctcgggaagagggagaaggagcgggtggggaacacgtcgagcccaaacacgccgcactggccggatctgcaccgacagaggcggatgggaagaagagcacggtcggttggttggaatccatcggaggggtcaaatcccccaactcgatcatcgacacgtcggatacctcccaacgcaccctttcctcgaattggtttaccgaaaacatcccgctcgagttttacgggacggcataccacaacgccgggttgatcctctttgccgtcctcgcgacccgggcgatcaccctcctcagactgagttggggatggatcatcatcttgctcgccttttgcatgaccatgtactcgatctcgatagagaggacgagagcgaggacgagagatgatatacagagggaactcatgaagaccaggttggtcagcgagactgaatcggccgattggatcaacagcttgttggaccgagcttggttgatcgccgaacccctgttgagcggcaagtccgagtttccgctcagagattgacccctgtcgatccatcgagctcatcctcgttcttatcctgcccgatcttatagctaccgtcgtggcctccgtcgacgaagccttgaaagcggccgctttcggtcccgtagagtccatgaagctcaccacctttacgctcggcaacaaggctccccggatcgattccatccggacgtacccgatgaccccggacgacgaggttatcatggaatgggccttgtcgttcaccccaaacgacctggaagacttgacgcccaagcaagctaggagcaaggtcaaccccaaggtcgtcttgagtatcaagctgggcaaggggttcgttgggggttccatgccggtcttgctcgaagacattaggttcgtgcgagacggatatggacgcgagtgactcccgctgatacagttacggtttcccgccccgatagcttcaaaggttcgatgcggatcaagtaaggcctattcagactcgggattttgatcccgcgacatgtattgatcaccttcatcatcaggttgaagttgatgtccaactttcctcacgtccaaatggtgcacatgtcgttcatggaacaacccgatttcgactatgtgctcaaaccgctgggaggcgagaagtttgggatggatatcaattcgattcctggattgtcgacctttatcaaagatcaggtccatgccaagtgagtcgggtccggtcgtcactattgttgcgccactcgaatcgggaaaatgaccttcatgtgtcgttgtagcctgggacccatgatgtaaggagaatccgccgcctgttttccgctgcaagtcactaatctctccaggtcaacaggtacgacccgaacgtattcacgatcaacttggagcagcttctctcgggcactcctctcgattcggccattggtattctcaaggtcacagtcgagtctgcaaacggtctcaaggcggtcaagctcggaggtggggcgcccgacccgtacgttgtcatgggtgtcgggctcaaaccggccgtcaacaagaccagcgtcaagcacagcacgagtcacccagtctggaacgaaacgcagtacatcctcgtcaacacgctcaacgagtcgctcaacttgtccgtattcgattacaacgaacatcgatcggataacgcgctgggaacctcggtgttcgatctcgccagcctggtggccgatgccgaacaatcgggattgagctccaagatcgtgcaagacggcaaagaccggggtacgatcaagtacaacctcgccttctatccggtccttacgccgaaagcgcttccggacgggaccgtcgagccgccacccgagagttccaccggaattgtccggctgaccattcaccaagccaaggatctcgacatgtcgcgttcaagtggcacgttgagcccgtacgcggcggtatacctcggtagcaatcaagaaatccatcggaccgccaccatgaaggcgtccaatacgcccgcctgggaatccgcgacagagtttttggtggccgacaagacaaagtcggtcattacgatcaaattgtttgatgatcgcgctttgcgagacccggcactaggtacagctgtcattcgtctagatgacctgctccaggccaaagaacgccaacaagactggttcccgctgtcaggagcgaggtcgggcaagctcaggatcacgacggattggaaacccttgcttctccccgggagcgtgggaggtgcggctgcatataccgctccaatcggcgtgatgcgagtctggctgaagaaggcgatagatctgaaaaacgtcgagtcgggcttgggaggcaagagtgacccttacgtccgcgtcctcctcaatcatcacatcatcgccaagaccgaggtgatcgacaacaacttgaatcccgagtgggacgagattgtatacatcccggtgcacaatccgaacgagaccgtgttactggagattatggatcatcagaatctcacaaaggaccgtcatctcggtaccgtcgaggtcaaagtctcggaatacatcattgccgatgagaacaacaaggagacgccatacttgtcaagcggaggaaaagaccgctctgatgccgtcttgttgggtagcggtcaagtcaacaagggccgtttgcagtatcacgcatccttcgttcccggtgtcgctcttctgggcggggttcatttcgaaccggtgaccgacccttccaaagtgctggcaggaaagcctctcaacttgccgaccgaggagagcgacaaagtttccataagaacggccaatggcgatgcggctagcatcaaggagcccgaacagacgcagccgggtgtctccatggggatcagcgaacttttacgagagcgtacgtcgtaggctgtcccgagcttgtttcagttgtgcgtgagctaacctgacattatgcggtgcagaatccggcgtcttggtcctccaggtcattgctggtatgatgcctagaaaaggccgtttcgaaatcttggtcgacgagaatgcatcgccaagcttttccaccgaaaaggcgcgaggccaccgcaacacgtgggaccagatcggcgagatcgtcattcgggaacttgatttcagccagctcacgctgagaatgaatgagaacgatccggacgaaaaacctgacgtatttgccgagctgagggtgcagacgcgaaacttgctagagggcgcttgggtgggcacttcaaggctcctctttcctgtgtttcccagctgatcattggggtgggcttgacttcagcacgctcccaccacctatacgctcaatggcgtaggtggccctggttcagaaaagacgaccattcttttgcaagcgcgatatgttcccctgcgcatgatcctcgagatgcgtgaaagcgtcgtcagtgagtagcgactaacccaccttgataaaattcacgctgatcacaacctttggtagatatgggtatcctcggggttgaattggtggatgcaaaggggcttcaaggctctgaccgaagcgggaagagtgatgtaagaacccggattgcgcatatgccgccggctaattggtagggtcttgaactgatgtttgctattggcagccgtatgtggtcttcagtctagccggtgaaaaggtcttcaagtcgcaagtgaagaagaagactctggcaccgagctggaatgagcggttcgaggtggtcgtcccgtcgcgatctagatcgaggttcacctttgagatcttcgactggaaccaggttcgccccagtcgtatgagctcgggatggttctcgagactgatataatataacttccttcgacacagattgagagtgccaaatcgctgggaataggttcggtcgatctcgttgctattgagccgttcgaggcctccgaggtgaacctgcctgtgatgacggccaaagatggcaataaaggtgcccttcgcttgcggatggtcttcaccccacagctcattgctcgagtccgtcgccacaccgggactttgtctgctgctggaaggacattgtcctctgtcgggtcgaccgtaggcgccgccccgatcatggtcggaaagggggtcggccacggtctcgtcgccgggggtaccggagtcgtccatggcgtaggcgccgtcggaggcttcgctggacgaaaggtcggtctgattaagaagaaagacaagcaaggcaacgaggtactcgtagaggaacccctagaagacggtttcgaagtcttgggcgaagaaagagggcatacgaggaagccatctcagaaaggatcgctcgcgccatcgagcgcgccaggacgtctttcgattacgtgcctcaaagcgaggggcatatctgggaccgcctctggggatgtcaagccttatatcatgctacagacggaaaaggaaaaacatcatacccatcatgcgaagaagagcgaggaaccggaatggtaagatacttctacgctcgagccaaggcttttgctagtggctgaaatgtgtatacgcgtgctgtgcaggcatgagaccttttactttgacgcgtccgcgagcgcgctcacggtcaaggtgtacgatcgcaagaccattggcaaggacaaagaggtcggcgaggccttgatccaggtaagcacgggcgggaagggcgggaaacgggaccggccataggcctggcaaagcgcccgcaggcgaggcctcttgtctcgcataccgttgattgatccaacattactctcgcttcagctggacgatcttgagggtgcaagcgcagagcggtggatcgacctgagcaatggccggggccaggtttgccttagaatcgacgcgggtgatgcgggtagagcgtcactgagccggttaaagacgcccagcatgagatccctggttggcaacaactcgtctagcccgggaagattctcctttagaaagaccggcgggtgaactttgtgcaggcgagcgttgtgcggccgttgcgctgtgtgccggcgtggcagcgagtgacgaggatggacgtgttctgtgtcagtcgcgtgctgcaatctttccaacgggtttttttgcgaacccggcccgagctatttcatttactccgaacaccgtgacaatcttcggcggaggagagagcgaccggcatattctaattctcggtcccgttaatcgaatacattttccctgagtgccgaacggtcggccggctgggtcttccggtcaatttctttccttctgttgaccggtcacgcaccgggaacgccaaagcgagcgatccgaaggattgtcacccgttcaagtgcccgggctatggttagctcagaacgcgtcctgtgagctcacgctgtccttacgagagggtgatcgggaaatcaagcgcggcagcggtgtctattacgaccgaagtagcgggatgtctcggaccatttgaacaggctagcgggatcattcgcttagagaatcgatcgcttcccgctgtctcatgttctcggattttcgtcactcccgtgggcgatcaatcctttggcatatgcaccttcaccggtgaacaacgacgcgactagagtgacagcccagagattctactaggcaagggtgaaaaaatcctctaccagacgggtagccagaatagtatatagcagccgtccagatgaatgaattctctctattttcattctcggctgcccttctctatcaaccaagcatcctctccctcgtcctagtcctcgatcaccacctcctctcctcccatccttcatcttcggctctcgcgccctacactctacctccgtcacatctctcattctcttcgcaaactccaacacaatgcgcttctccatcaccgccgcccttattgccatcatggcccccttggccttcgccttgccctcggcttcgacctcgacctcgatcgagcaccctgacgtcgagcttgtctcgtcggttcacaacctcaccgagcgaactctctaccctgttgtatggacttcgcttcgatgtgacaggatctcgggttactacggtttcggtatctttgccgtcaggtacgacttcggatgtctttgctacaacgacgtcgacaccttctgccgagtcaatagcttgagctacagcatgaacacctggatcaaggctcagttcaagtaccagtcttacaacaactaccctaccggtaagtcgctcagtctacggatcaatccttccaaactcgacgctgattccaaccaatcttctaggttcgcaacccacctgcgacgacaagggtggatacacctgcccttatggcttcaacgccgacaagagctgcgctcagcatgctgctagctgcggtgatggccaatgtcttcagtcggacggaacctgttgcccccgaggtactaccaagatcaacggattggtaagtcaccgcatggccgatgcgcagtccttgacacacgcttaccttttgcacttttccacatttagtgctgcgctactacctgcaggggtacttccaacggtcaatgttacggagctggttcatgcaccgatggcaaggtcttgaacaacgagctctgctgtaccaagggttggactggttacaagaccgtctgctgccctgacggtcaagtcgaagactccaacaagcccggcacctgcaagtgttccaactccgcgcaaagcatcgggaccaacggagtctgcgccaaccgatgcactactggcaacacctggtacgagagcgctaccaagtgctgtcccagcttccaaacgctcgtcggcggacagtgctcctgccccgccggccaggtgctcaacttggccaagaccgcctgtaccgcccagtgcaccgaccaacaaaagttcattcccgagactggtgtctgccagcccaagtgtggcgctacctacacctggtcgtactctcctaccaacaccgccggtctctgctgcactggtggaagggtctgccacactactgtctgctgtctcactaccgagactgagagcaacggtcattgctgccccaagggatacaactaccgaaacggcgcctgccaagctcccagcggcgttaccgccccccacaagcgtcgtcgagccctcaacaaccagcaacctctgaccaagtctgaaaagacccgtctcaggattgacgaaaagctctgccctaagaacctttctgcctgccctatcaacgcttccgacaagctctcgtacgagtgtctcgatgcctttaccgacatcagctcgtgtggaggttgcgcttcgctcggcgagggtcaggactgcaccgccatcaagggagccaagtggatgggttgcgaacagggatcatgcgtcgtttactcgtgtcgaccaggattcaagctcgttggaggcaagacttgtgtcaaggcataggtcaccaataccatcctgcttttcttatcttgggctcatcggggctatcatcacacgcggacgtacaggacgtacccgctctcacacatcataatcaatcgagcgatcttatcgacgcttcgaaatgtcattccttactagtcgaggcgcgaagcgctctctccaccttgtacccacaccacgatagacatcctgtataccgcacgcgcatagatgaccttatcgattagcaatgctatctcgaactcagggcactagccagtcccgatacgcttcaattttccttgactatcttgcgagctagctctgtcggttgcggtcacgaatgcggttctttcttccccaactcaagctggcgatcttcctggttgatccggctcaatcgaacacgtaccccgcgtcacccgttgatcgcgatccccacaattctccatgcgcaggggcccagagcaacggaagagctcagggcgttagagcgatgattctgtgcaagttctgtcgttttgcgctgcttggcacgtcgaccgaagctggggtggcagtcccccgcaacggattaggcggttccccagactcgatcagcttatcgccggtttaaaaccgctcgcttggaaccttctatggccagctgacccttcttgcacgtaaatgagcggctacgatagtgggattcgcaggtcaacaggcggaacaggcaggatgacgagcgcggaatcatttttcattcaggtcctgtcgcgatccgaaccgacctcggctggtttcgtgtaatcgcttctgccgcttgtgatttacagtaggacggggccctcgaattttcaggcgacctcctgcgatgttgtgccccaatcgcttagctacccaataccatgcctgcccctgccccgaaagatactggccttgtctgatgcgcatataggctcgagctcttgaacccctctctgatcgggtcctgcttgcccctttccgttttgctctttctcaccaaccagttgactgtcgggacgccttttacccacgactcttctagaccagcaacccgcacctcctcttcttcctttctcttccctctcaccctcggctcatcatgtcccagccggccgactttgctgcgcccgtgacattggctcctctcaagagccgtcacggtgataacaaacacctggattccgaggacaacagcgttcgtgcttacgaagcctcgcctgccgagatcgaggacgccaaaaatgatgccgtattcggtggtacgaactcgaacggtcccaactacaagaacgtgagtctcctgctcggcctctactgtgtaggaggcctcgtctgactctgtccaaaacctctctgcgttgctaggtcggctggatgggtgccgccgtcttgatgatgaaggcgcaggtcggtttgggagtattgtcgcttccggccaccttccacaccttgggtcttgtccctggtctgatcgtcttggttgtgatcgccgtcctgtggacttgtgagtcgaagcggctgcggtgcgcgccaagaatcgcgctgattttcgttcggtcgttccgattgcagacggagcctacgagatgggcaagttcaagcaccgacaccccgaagtgtactcgattgccgatgttggtgatgtcgtcctcggcaagcccggacgatacatctgcgctgccgtctattggctctgtgagtcttgatctcatgcgcgcgcgccttacatcaccactgactcgacccgcgcgacgctcagggatgactaccgtcgccggttccgctcttttgtccatctccatcgctttcaacgccatgtccttgcacggaacttgcaccgccgtctttgttgctgttgctaccatcttggtcttcctcttggcctcgatccaaaccttggacaaggtcgcctggatcacctgggctggagcgctcagtttggtcgtttcgctcttcctcgtcaccatcgccgtcggtgtagctgagcgacccgccgctgctccccaaaccggacctttcgacaaggatttccgaatcatctccaaccctacctttgccgctgctatgagcgccgttagtcagctcagtttcgcttatgccggaacccctgcatagtgagcttttgcggctgcgcttttatgcaactgtagaatgctgattccgactcttctcgtgctcacagcctctctatcatgtccgagatgaaggactcgaggctttacactcgttcgctcctgctctgcaacggtttcaccactggtctttatattgttgtcggcactgtcgtacgtccaatcttgcaacaacgaagattgtccctcgcaatggaagctcatcgcgtttatcctttaggtctactactactctggccaatacatcgcctctcctgccctcggtagtgctggacccctcatcaagaggatcgcgtacggactcggtctccctgcccttatcgtctctggaatcttgtacacccacgttcccgccaagtggatcttcctcgccgccctcaagggaaccaaggatctcaacaataacacccccaagcactggatcgtatggttcagttgtgtcgcgggctgtgtgctcttttcttacgttatcgcctcgtaagcgcgttttttcgggttaatacgctacgaatggtccactgatcgatggattgcgtcgttcagagccgtgcctgtattctccggtcttgtaggattggtcggggccttgtttggaaccttcctgtgtactatcgtgaccgtgagtcgttacaatccgcaaaaaatatgaatcgcgcgcgctaaagcccttttttgccgcagtcctccatgtggttctacgacaactggggcaagagcgacggttcgatcacccgcaagctgatcttcagcctcaacgtatccatcttcatcattggtgcattcgtaactgtggctggtacctacggttccatcgaagacatccgtatcgggtacgctgccaatggcggaacccgcccttggtcttgtgacgacaactcgaactccacctaggttgcgtcgactttcgggttctccagcatgtcgcctgcttagcagccggagcaaaaaggcactatagcgtgtctgaagggggttcgagcgttgtgatgtggtttgacaacagacatgaccgacaatttgtaattcgagacagagagacgatacctttgcatatcaaacaatcagcatattcctagtggcccgctcaaacaccgagcgaattcgtttctttcctctggcagagaggggacactctcacgtcgcgtgtgacggatagattactgaaagaactgaagctccctggacacggtttcagatcgagcgcacgaaaggttccgctgcaatctctcggctagaatacacgtcatatcaatgacaaacagcatccgtcgatcactctcgcttatcaaagaaagaactagtcatactcggtagcatattcgaaaccgtgcaatgcgaagtcgtcgaaatgtcgcccgaaacaagctcctagctctcagctgtgaccaactcgaccttctgacgtctccatatcacagcttcgtcgtcgatcccatacatagcttaggcctacgatagtgactaagctgcaacttcaagcttgcatccaagtctcacacgccatacaagctcaccatcatgtccgccaaccagaaagttaggcaagccgatggactgcttatgcacattcatgacgctgcccagggcccagtgtacgtcgagtcaagtctcagatccgcttgtcatccaattgacgatggaatggatgtcgataacccttcagtctgcctaagaagggggaaaggaacgtcctgattacctcggctctgccttgtgagtcaagcattatgggcacgctcatccaatctttcgatttaacccccccctcttaccagacgtcaacaatgtgccgcatcttggtaacatcatcggatccacattgtccgccgatgtttacgcccgatactgccggaccatgaacttgcctaccctctacgtgagtcatctcgtatcaaagggatttcgatccgagtgcattagctgaggctgtgacggtcttactcgtgaattagatctgtggaacggacgaatacggtaccgccaccgagacaaaggtatacccaccagcttggaaagtttgcctcgcgccatatgctgaacaggttgattctcgctcaggctttggaagaaggcattactccccgtgagctttgtgacaaattccacgctttgcacaaggagacctatgagtgagcggacccaatctctcgcatatcttctctccctcgcttatcaattatgtccgactggcagctggttcgagatcggcttcgatcactttggccgaacctctacccaaaagcagacagagtaagtagaggcctaaatgatggatattattgttgtgtttctaacgagcccgttgcagtctggtacaagctatctacttgaacattcacaagaacggtctgtttgtgcaagagacagcagagcagacatactgcgaggatgagggacggtacgtcagctcatcagcacacttttattgatgatgcgaccctgaagtgacgatttcgcatagattcttggcagaccgattcgtcgagggagtttgtcctcgatgtggatacgacgtgagacgcgagcaccttgggatttcatgtttacgtctctaatccattggaacgcatatataggacgctcgaggtgaccagtgtgaccagtgtgctggtaccttttcctcgcctaccgaattgctgcaaccccgatgcaagcgcaacaagaaccacaaggtcaccaccaaaccctcgactcactcgtgtctgcgtcttgacgctctgcagccgcggttggaggaattcttgcaaaagacacgggagaagggcaagtgggctaacaatgccgtcatcctggccaatggagagattgtcgagcctaggatgaagggaggcttgcgtcccacagctgtcacaagagatttgacttggggtgttcctgtgccgcctgttggtgatgagaaggaggacgaggccatgaagggcaaggtcatgtgtgagtagcatagagatcggtcttcacattcatgcctcgctaaaccttgacttatgcagatgtttgggtatgttaccgctcttcagaaatgaaagaggaagccgtcagggtactaagacatttttatcatccagcttgatgctcctattggatacccttcgatcaccgccaactacaccgaagattgggagaagtggtggaaagcgccagacgacgtcgagctgttccaattcatgtgagcgcaagatgttgcccgactcggaggagaagatgttgacgattttcttcttgtcatcattcaggggcaaagatagtaagccctcttccttttgcttgtaattatgtccgcaagattgagctgacattgtaatgaccagacgtctacttccacaccgtattgttccccgctgtgcagatggctgatggaggcaactggaccatgttgacaaacatctcgggtacccgtgagtactgtcaagggacagcccgttctggacacaacgctgatgtctctatcatggctcagagtacttgaactacgagaatggaaagttcagcaaaagccgaaatgttgggtgagtcgcttacattaaaaggccaatgatgttcaatccctaaagcagtttaaccacccattccgcagagtgtttggtaacagcgccaaggagacgagcgctcccccatctgtctggcgttactacctattgatgaaccgaccggaaacctccgactcgcaattcatgtggggcgagtttatcgctcgaaacaacaccgagctgttgaacaacctcggtaactttgtcaaccgagtgagtagattctggtcgacaactgattgtagcgttactctgctaacgactgccatcgatctagtgcttgaaattcaccgcggccaagatggactctgtcgtaccaggacctagcgatcaccaaggaggagctgtctcgttcaccgacccctcgacagacgaggagaagctggacgccgtgttcgtcaacgatatcaacgaactgctcgactcttaccgctcggccatggattcgctgaagttcaggaacggtcttattgccgccatggccatgtcggcgcgaggtaaccagtaccttcaggacaacacgctcgacaatgctcttcttgccaatcacccggagcgatgtgctcaggtcattttgaatgccatcaacttgatctacactctttccgtcgttttccaccccttcatgccttccacgaccgatggcattctgcagcagctcaatgcgcctgcccgcagcttgcccgacgtgttttcaatcgacattcttcccggccacaaaattggcaagccggatcacctgttcaagcgaatcgaccccgccatggaggtcgactggcgaaaccgattcggcggggaatcgaccaagaaccccggcccggctggcgtcgaacggaacgttgttggggcgggtaccgcggttggcgctggggccaaggcgacccagggcggtctgtcgaaatcggctctcgccaagcagaaaaaagcggagcaaaaggctcaatcggccgctttggcggctctgaaagaagctaacaagacgcccgaggtcaaggcgctcgaggaaaagatggacaagcagaaggaggtcgtcaaggacctcaagacgggcaagactgagggagacgtcgacgccgaggtcgcagaattgctcaagatgaagaccgagctcaccgacctcttgaaagccctggaggctagcaagatctcgaactagacaccatcatgccgtttagcatatgacatctactcttgtcgatcggattcattgattcagtatcgtgcaatttgattatgaatgtacaagtgcatgttttgcctggtgttgagactcgtaaaattgtgggatcaacacgacgaacgtcatgagatccatgtcatatctaagggtgatgaagaaactctgttccaatgtcgaaaagccagttgatagcaagaagctcttttgggttgtttctcgtcgcgaatgcgcatctagaagagtccggtaatgtcaccagtctcgggatccaagtcgatgtcgtagaatccgggtcgggtggtgagaccgggcatggtcgacatgtcaccgaccaaggggtagacaaagttggcaccggccgagagcctaacacggttgatggggagggtgaatccggtggggacacccttcttgctggggtcatcggacaacgacagggcggtcttggccatacagatgggcaagttgccgaatcctgacatcaaagacaagatgacgtgatcagcgacgcgttcacgatctaccctacgcttgccgcacgcgactcgactcaccttgtcgggtgtaggtctcgatctgcttcctggcctcttcgctgagctcaatgtcgtcggcaccgtacatctcggtggcgatgatcctgatcttttcctcgagcgacttgtccaaaccgtacaagaacttgaactgagattcgccctcacaagccttgatgacggcctcggcgagcgagacggctcccttgcctcccaaagcccagtggttcgaggggacggcgtagtcggcaccgttggccaacgagtagtcctggacgagctgcagctcggccggggtgtcggcactgtcaaagtggacgaggacgaggttgacgatttcagcgtgtggtccatcaccagatccgacgcggacactcacgagaactggttgacggcgacgacgaccttgagaccaaactttttggcgttttcaatgtgcttgcccaagttggcgcaacccttttcgaggagctcgaggttttcctgctggtagacgtcggccaagggcttcccgggggtaacggcgggtccacctccgtgcatcttgagcgctcggacagtcgcgacgatgacgacggcgttgggcttgagtccagagactcggcacttgatgttgcagaactctgtgacgaggggcgaagttcatcagccgggggtctcgcaacacacgtcggaacgcctcgaactcactctccattccaatgtcggcaccgaaaccggcctcggtgatgacgtatccggctcggctggcatcgtctccctcttcagtaccggcgagcttgagagcgatcctgtcggcaatgatggacgagtttccgtgggcaatgttggcaaagggaccggcgtgaacgaagacgggggttccctccaaggtttgcataagggtgggtttgatggcgtccttcatgaggacggccatggcaccggcacaaccgacgtcgtcggcggtgacggggtcgcccgacctgctcgtcccgacgaccatctttccgagcctgcagtacgagtcgtgaggttagtgacgggtggaagaaccgaaactctgtatgtgttgcacagggggccaaaactcacctctccctgagatcggcgagatcggtggcgagggcaaggacggccatgacctcggatccgacggcgatatcgaacgcggtctcccgagtgataccagcctcggtaggcgcctgaccgacggtgatctttcggaggtaacgatcgttggtatcaatgacacggttccacgtgaccgtggcagggtcgacatcgagcctggcaaacttggtgatctcctctggggtcaactcctcgggcttggtcttgtcgatcccgagcctctggagccgcctgagcatgggaggcgcaaacgtcttgactccctttttagcggggcacaatcgactgaagagccccttgtccgactgttgagtctcgtggaacattctcgcgtcgagggcggcggccaacaagttgttggccgcggtgacggcgtgaatgtcaccggtcaagtggaggttgaactcggtcatggggataacctgcgagtaaccacctccggcggcacctcccttgacaccaaacgtgggtccttgcgaaggttgacggacgcacgcgatggccgtcttgttcaactcggccccgagcgcctgggcgagcccgatggtcgtggtcgatttcccctcaccgaggggcgtcgggttgatcccggcgacgacaatgtacttggcgtctttacgttccttgagcctgtcgagcaccgagagttcgaccttggccttgtacttgccgtaactctcgacctcgtcgggaatcaaacccatctcgctggcgacctcgacgacgggtttaggggtctgggcgacggcgatctcgatatcgctggggacgttttcgagaagcttcaatttgaggggcttgaccttgcggtcccgaccttgttgccattgacgcttggcggcctcgaacgtgttgctcatgagcatggccacggtcatcgggccgacaccgccggggacgggggtaatgtaggaagcgacctgcgaagccgattcaaagtggacgtcaccgacgagacgttgaccggactttttgctcgagtctgcggtcgtccgggggtcgtcagctcgccatcctttggtatcgggtggatcgatgtgtttgtggacgagacttaccaggaatgtagttggttccgacatcgatgacgacgcatccctttttcaaccactcgcccttgacaaactcggccttgccgatggcagcgacgacgatatcagcgtccttcaactacgagtccccgcgagtccgacgctcaaatcagccaacctgttctctttgtgagtatgaagacgggtgagagcaagaatgacgcacgatagactccaacccctgtgtcctcgagtgacactgggtgacggtagcgtccctcctcctcaagagcgcacagacgggggtcccgacaatgtccgatcgaccgaggacgacggcgttggatccggcgatcttgacaccggctgcgcgggaggcggggaggtgggggagtggacatgaaacgacggtggtcagctcgaccggtcgtgatcggatgagggtgcggggacggcggactcactgctatcgataagcttgatcacgcctgccggggtacacggggtgaacgccggggtagacaacctcgaagacaagtgtcctatattctccggatgaaacccatcgacatccttgtccacgccgacggtctcgacgacgatcctctcctgttcctgggtagcgccctcgagcgggagttggacgaggagaccgttgacccgtggatcgccgttggcgcgtttgacgagcctctcgatctcggcgactcccttgccctcggattcaccggattcggcgtccgaggccacttggatgtgttcgacggtcatcccgctctcctgggcggccttgagtttcatacggatataagtggacgaggcggcagaggaaccgagttggaggatctggaggtgagggggtttgaaggaagggtaggtagatcggagcgaggtgatctgcgaggcgagctcggagcggatttgtctgcgggatcggggtcggggtcgtacgtcggggttagtcttgatatgagacgacgacgacgaaacgacgtcgacagactcactgagcgacggcggtgccatcgatggtctgtgccttgccagcggtcgactggacgccctccatcggggtctgtccaccttgagggttctgagcttcggtcaggggagacatgccgttgtcactcgatgacttggtagcgtaggttcgggcgacgatgtggtggtggtgtttgttgatcgaggtcgaggtcgagatcgatcggatgttttgttgggttgaagacgacgagtttcgggtgagaagactcgatgagatgacaggtaggccggtgttttttgttagtgtggatcgggacgaaatgttcgtacaggtcgatctcaatctgatcgctgctctgtgcataggtgtgacgacgacgacggggagatatgtgagtggtagagaaggttcgatgcggtgtggtggtggtggtgtggtggtcctggcctggagtttatctctgtgtgtcaacgtggtgcgtgatgatttcggtcgaatcaaaccgtgtccaacgtgagcgacgacgaggtgcgaggtgatagagttttgggtattttccaacaatcgacaggtttgttggaaaataatttcagagagcgagccagccagcagccaggctaatggctagtggctagtggctagtggctagtggctagtggctagtggtggctggctggtttcgttatctcggcatcgcgcgcgcgagagagagcacggtccttggccaactcgagcatgtaccgcggatgactcgtttacaaccagcagctagtgcaactactctagctactagctactagctactagctactagctactagcattcgatcgtcatttcactcgcactcaccggctcaacctgggtcgagctcgaaatcgaccacaagaaggtcaccaggtcatccgagtcacccccggcaacccaactcacctccacgtccatcaactagctactagactctggacagacctcacccgcaaagatgaacaactcgggattacgcggtaccaccgccgcacaggataccgtcagtcaccgacccgacctcttccccccgagtagcctctactcggcactgaataacgacgacgacgacgactgctgacatatacatcgcattgcatcgcatggcatccgcagcgcttcaaggataaagaatctaaagccttgaaggggacgaaattcccacccgaattcgatcaaaaggtatgacgacgacgacgacgacgacgtcgagctcagcataacgacctcggctgataccttttttgtctgttttgcaggtagatgttcggaaagtcaacctcgctagcaagtccccctccctcctgagcaccccgctcttccccctctcggacctccagctgacccggtctctaacgcgatatgtgcatgtgcatgttcgaccccaccagtcatgagaccctggatcaccaagacggtcaccgagctctcaggcgtggaagacgatatcgtgatcgagtataccatggaattactcgaaaatccggagaatcccgtcagtacaccgctcgcgctcccgggagagaggagaggaggggagatgagatgatgagacagacgggctgatctgcggggcggggatgatagatgcctgatccgaaaaagatgcaaatctcgctcgtcggtttcttgggagagaacgtgagtccgccatcccacccgcttcttcgtcttcttgctcgcaaagagtcatctcccgccaacctaacctgaactgacctcgatctcgaccgcgacctcggcctcgacctcaatctccatctccacttctctatcacgtcgaatcaccgacctggccgcacgtccaggccccagagttgatgaacaggttatggacattgttactctccgctcagacttccccagggggtgtacccgccgaggtgagtccgatccaagttcccagggactcggacggggctcggacctcggggggcatttcgtgaacatccaactgatcagtcggtcctcacgtcattttgtttcctcatacacccaacgtcacgcggacatgacagttcatcgaagcgaaaaaggccgagctgttggcacaacgtgaagctgagagggtcatgcaggaaaagatgatgggccgggggggtgctccaccaggcggtgctcagggggtgagtttacgagtacacgactttgacccgatcatcgtgacctagaccatgggtgaccaagcaaccgggactgacatttctgacttgtggggacgataccttagggcactcggattcacgcggggttctcatcggatcgacagccaggaggtggtgcacagaggtatggcgatcgaggtccagtacctcgggatagggatggtagggctttccctcgtggccagggcgcagaggggtacggtcgacgcggtggagaccgatacgattacggtgggggcggtcgtggagctgaacacgtgactcttgtaaagtcgagtcgggagttcgattctctctgggggtatagccatgtttagccaaaaaaaaaggcttttaactaaaaggaatggataaactttaccacataattatgtggtaaggttccctaccttgttcacaaatcctcaataccgctaaacccctaaattcggggttttttggtctttgattacatacgtttaatacgtagcgtaaagggtgtaaatcaaaaaacaattaacaatgttagcagcagcaaaatacattggagcaggactagcagcaatcggactaacaggtgcaggtatcggtattggatcaatcttctcatcacttatcgcatcaacagcccgaaacccagctgtacggccacaactattctcattcgctatcctagggtaaaatagccctaaccttgttattatgccaattaaacataaaatacaagggaaaactgattaaattgcagagaaaagagttatttcttgatctgcttcggtaccaccgttcaacgactaatcttgatcaagataaatcagcagtaatcctactgaatacatggtctaatcaataatgtaaattattgaatggtttaacatgccttgtaaatataatgtcgctctagcagaagcaactggacttgaacaataatccagcataaatcaagcctttagcaagaatatcaacgttaacacttgataatttgcgacactagtaataattctggtgttcaacgactaaggtagaatatgaccttaaaaacgcttgacagctgtaaaataaaacagctggtgacatagtctaatcaatggcgaaagttattgacgtgtgagtaaacacacaactaatgaatggtattcgctcttatgatctcattcctagttctatactcatagtttaaaactatttgtcgaatccccccccacactttggttaatgaggcaatggtggacatctttaattaggtatgcttacacaagctaatataccaaaataacataactggcaagcgtgatggaatggtagacatgctacacttaggatgtagtggcttcggctgtgagagttcaagtctctccgcttgtatacacccaataaacaatcccccctcattagcaccgcaaactatgaaaagcaataaattatattggcactagatgtcgtagacttaacctaatactaaatttaagaggggcggagtagctgccatcagataataaaatgcatttaaactattaaaagaagcactagattaaattatttataacttcactaaaccaaccttaaaaaaagggacctttttttttttgcactaataaaggcgagcaagcccctctccctcaattttcaaaatagggggagggggtgaaaagagtagaagcaaaaataagtcgctaaaaacaagctgaggaaaagagtgtagtataacggttagtgcaacgatctccaaaatcgtcagtagaggttcgattcctttcactcttgaatttaataaccaaataaaagagtaacataagtagtaagtatagtacaatggttagtgcctctgccttccaagtagatgatcccagttcgagcctgggtacttatagcaaacaaccatgaaaatggatctaacagaacaatctagtcaattatgactagtatacaataagacgataagtcgcattattattatcttattattagtagtaagataatgataaatttaagaaagcatttgattatggtgcttactgattgctatctaggggtttaacacatgctagtcaatgattttttagatcatggcgtacgggctaggaatacttagaatgataactttacgatcgcagaaatagcgtaaaaggtttaataaccgcgtagagatttgctttgtatctcaataggtagttggtgaggtaatgctcaacaagccgatgatgagtaatattggatgaaagtctttaatatagcagtggaaatgaaaaagtccaccgttacatattagcgcagcagtggagaatcgtcgtcaatgcatatggtctactcagtagattaatgtgaacgcgccacctagattcggataggggatagtatcctctgccgataaaagagttttgaaaatggatcgaattcttagtagtgggtgacaatcgccgtgccagcatcagcggtaaaacggcttccgcaagcaatagtaatttaaattggtgtaaagggtacgtagccggccatgtttggctagagttagatacgggtaagtacaatacttggagtagggctgatatccgatcatcccaaggggagtgctaaaggcgaaggcaacttactggtaataactgacggtgaggtacgaaggtcggggcatggaaagagattagatacctcattactcctgacagtaaacgatgtagattaaggatagaaataattccgtcctaacgctaacgcattaaatctaccacctgtatagtatagtcgcaaggccgaaatacaaataattagacggcctgagagcaaacggagtgaagcatgttatttaatacgataacccgcgtacaatcttaccagcttttgaatcttagacaggtgttgcatggttgtcgtcagctcgtgctaatggtgtctggttaattccaaacaacgagcgcaatccttacttctagtttatctaggagtttccaattgattcatcaatggttcaaggaatatgacaaaccctcatggcccttataagctgggcaatagacgtgccacaagaatctttacaaaatgacgcgaaatggtaacaatgagctaatcatcaaaaaagattaatgtacgaattgtgggctggaactcgcccacatgaagtaggaattccgagtaatcgcgtatcattacgacgcggtgaatatcatctcttgggtgtactaactgctcgtcacgggacgaaagggaatatattatgaagttgggctgattgggtaactggtcagtgttgcgaataatacttcccaattgttctgaagtcgaaacaaggtaaccgtaagggaacttgcggttgattgataacacaacaaatccccttcctctagaatagaggaaaagatataaatatcttataaaagagagcaagagatagttaagggaattaatggctaaggacgagtaaaaggaatacaaaatgatttacattggcccaggtattttatcgccttaaataaaagtaaggagaatgatgtatttacatgcgaataaagggaaaatatcctaattggtaaggaaccactttgtcgaagtggggtatggcggttcgagcccgctttttctcgtactcttcttgcatactaattagtatggcaaaaggaactgtgacttttgctgcattggtcaatgcgcacaacaatacagcagtaactatgttttactcccttcacccgcttctgctctcctatttaaatactgaaaagtgagcaggaaaaagagaaaggtgtggatcatatagtccttatctttaatttgcataaggataaaatcaaaacatctatttatatagactcttatctttcgcccctttacttaatctaaagtgggggggggagggaaatgtcattattaagtggaaaggagaatacatataattagactcgcatttatacttgtccataaggaactataaacttgcatatgaacctatctttagttttattcttaattggaattcttggtttcattcttaaccggaaaaacattattctaatgattatttcaatcgaaatcatgctactagcggtaacattacttgtactagttagttcatacagtttcgatgatatcgcaggacaaacatatagtatttacattattgctattgctggagccgaatctgctattggattaggtatcttagtagcatactaccgactacgaggtaacatttcactacgaacataatgtatctatctattcttgcacttcctctatttggatcagcagtagctggtctacttggacgaaaaattggtgtgacaggagctcacctaattacaacaggttcactaatgactacaacattcttagctttagtagctttctacgaagttggtctatgtggatcacctgtgtcaatccaaacattcgattggattgactcagaatttatgctagttaactggggattcctatttgacagtctaactgtatcaatgttaatccctgttctagttgtatcttcattagttcacctatactcaatctcatacatggcagaagaccctcacaaccaacgattcttctcatacctttcaatgttcacattcttcatgctagttcttgtagctgggaacaactaccttatcatgtttgtaggatgggagggtattggtatttcatcattccttcttattaacttctggtatacacgtatccaagctaacaaatcaggtattaaagccctaacggttaaccgtgttggtgatatgttcctgagtgttggtttcttcgccatcttctgggtatttggtaacgttgactacgcaacagtattcagtgtagcaccttttattaacgaaacagctatcacaattatcggtcttctactactcctaggagctatggccaaatcagccaatttaggactacacacatggctaccagatgctatggaaggacctactcctgtgtcagcgctaattcacgccgctactcttgttactgctggagtttacctaatgcttcgatcatcacctgtaatcgagtacggtccaactacattaattgtaattacttgggttggtgctcttacagccttcgtagctgcaacaactggtctactacaaaatgacctaaaacgagttattgcttacagtactatgtcacaaatgggttacctattcatggcatgtggactttcacaatacaatgtggcactattccaccttgttaaccacgcgtcaaaataagagcgcgtgtaaaacgtggcaaattgctggaatatcgtagctttgtgcaactaaataaattattgcaagaaaaaagcgttaaatatccgacaaccagcaggtgtctcaataggtgtttacttattgaatcacttcaacgatcacaacccacgatattgttacttaacaatgtatgatatgatctatataaatcccttgtttcttttctctcacgctcctaatttttttataaaaaaaataaaggagcgataaaaatagacaagtgattaactgtcttcaaagctctacttttccttgctgctggtgctgtaattcacgccatggcagatcaacaggatctacgacgacttggtggtttagttaacttcttaccattcacttatacagcaatcctaattggttcactatctctaatggctttcccattcttaacgggattctactctaaagacctgattctcgaagtagcactaggtcaatacgaactaagcggtaacgttgcttactggttaggaacaatttcagcggtattcactgctttctacagtcttcgactagtttcactaacattcttcactgtgcctaacgctcctaaaggagattacctacacacacacgaagcgccaacaattatcgtgattcctctagttattctatcaattatgtcaatcgccttcggttacgttgctaaagacctgtttgtgggagtcggatcagatttcctatcaggagcattattccaacaccctaaccacgtgagcctaattgaagcagaattcggactaccaactttcttcaaactactacctgcaattggtagcttctttggagcaggtcttgctctttacctataccacgtagtgcctcaatttactattaaccttacagatagcgccttcggggcagctctgtaccgattctttaacggaaaatggctatttgacgtagtgtacaacaaatacattatcaacggtgggctacaattaggtttcgtaatctctaaagttattgaccgaggagtaatcgaattatttggtccttacgggttcagtactgtgtttacaaattcaggacgatcaatctcacaatacgacacaggagtaattacaagttacgctctttacattattctaggactaatttcagttattttcctactattcgcacctattatgttctctgttctagttccttcaacagcagatctaggtacaggaagtatgggattaattctactattcttaagcacacttgtactactaccagtagtttctacatcacaaaaataaaccccccccccttattacaatatagtgtaataaaggtctgtatgtgactaaataaagtaaaagaagaggtggcagcagaaaatttatcagtttatcattataagttaaaagaaagagatgcatccactagtaaacccaatggtaggggttagttgtggcatgtctttgaccttattaattaagagaggttattaattttctacccatcccccattatccttacctagacataggtaaggcctaattacccttccctatttgcaactgtacttattcatttttgagtcaagggaagttgtcgtctaatagactgttaactgctataacaattataaattagctaaaagagagcaaacttacttttccccttaataacctttttcttgctactattttaatttacttatatttttcacactatttttctttttctctagtgaaaaaagagaaaggaacctaagataaggggtgggttatcgatgtctatataacgtgtaccatttcatttaaactatatgtttgtattgcactcacggaagagaagagattcgaactcttaagggtattacccgctcagttagcaaccgagaccgcctctccttagcatgtgctcttccttttcacaattttgccttatatacaaaagcgacgtttatggcataagtaggattatgtatacgaggacagatggactcgaaccatcgacaaagtgattaaaagtcacctactctaccaactgagttatgtcctcacttacaaccccatgcctatattataatattagtagggctgagctgtttttacttacgctcttttctctcacttttttaacctaaaaaaaaaaggcgtgaaatgaaagtaggagctaaaaattagaaaggcggtaaagcagatggggtaaacattagtttattccttttacacgcccccctctccaaagggaggggggcgagtataagtaagagtggaaaagggcaaaactactgggttagatggattcgaaccaccatactacaccaccaaaaagtgccgagttgccaattactctataacccatataaaacttagtttaaaattttgattaatgtgcctaagcacttccccactttaatgctccctcacttttcacttaaaaaagaagtagcgagagaaaaagggtggggcgtgataatttgttactcttttactttcctgctcttacactgcaatataaacaaaacacatgacattcactacagcttccgccccaactttacttttttccatttttttctcgctccgcaggagcgtgaaaaaaaaagtggggcaagagttattggtcacttttatattatttaatgttagggggggggggggtttataattaaggagtaatatcgaaagcgataagaatacttggtactagtagaactagagcgattgctacaggtagtagtccagtccagcagaacagcataagtccatcataccgcatacgtggtagtgtggcacggaaccatacgaataggaatgcgaacatacatgtttttagacctagtacaatactttgtaggttaacaaatgtatcgttgatgaacagttctggcatgttgtaaccaccgaagaatagaatagcggttaatgttgacattaatacaattgaacagtattcccctaggaagaagaatacgaaaatcataccactgtgttctgtaaagaaccctgcaactaattctgattcggcttcaggaagatcgaatggtgtacggttagtttccgcaagtgctgagatgaagaaaatgatgaaaataggtagaagtggaacaatgtaccaaactgcttgttgtgcttcaatgatgttaataatgttgaatgaacctgtaaggataataacaataagaattgctgaagacagtactagttcgtaactaatcatttgggcagttgatcgtagagatcctaggaacgcgtatttagagttggcactccatccagcgaaaagaactccgtaaacaccaacagatgagatagctaatgtgtaaagaataccaagtgagaagtctgagattgtaagaccagccccaaatggaataacaccccatcctagtagactgaagataagtgtaataactggagctaggaagaatagacttcgagttgagtgagcgggtacaacagtttctttaactactagtttaagagcatcagcgaatggctgtagtactccgtagtaacctactttgttaggaccaactcgacgttgcattgctgcaagtgttttacgttcgatgattgtcatgaaagctaccgctagtagaataggtactaaaacgataagtacttcaagtaagttgtataaaattgttagcatgagtaagaatatttgagacttaatccacttgttctgttacttttttaatgaaataggtagacagttcaaatggaaagtagttgcttgtgtaccacaagcagaatagtgttgacaccaagcgtccctcagcttttcactagataaaatggaaaagcaggaaagagagaattgggcgttaggtgtctattagtattaattatgattgtgagtcaagccagcttaggtatttttctaggcttacggcttcaacacagataggcataaacccatggtatacaccacaaagttctgaacattgtccgtagtatgtaccttctcgttgaactagtactgaagtttggtttaatcgacctggagtacagtcaatttttagtcctagtgatggaacagcgaagtcgtgaagtacgtcagcacctgtaactacaaatcggatgtgtgtgtcaactggaacaacaactcggttatctacgtcaagtagtcgaagttgtccgtcttctaggtctgattctggaaccatgtagctgtcgaactcgattgaatccccgtcatcgttaacgaagtcactgtattggtaagtccagtaccattggtgacctaccactttaattgttagagcaggtgagaatacttcatccattaagtaaagaagtttaaatgaagggaaagcgatagcaataagaataagagcaggagtaattgtccagattagttcaattaatgtaccgtggttggcgtatttgtacacgatagatgcgttttttgagctgaagtttaccatgattgaccccatcatccatactacaccaataagaataactactaggtagaagaagatagagctgtgcagttctgtaataccttcaaatgcaggtgaagcaccatcttggaatccaatttgccaaggttctggtgcatcatttagcactgggctaagtaatgaaaataagtttaacatttttatttataattcacatgttttaaccttaactgtctatgtaattatttcgccattacagcagagtataacacattaaccataaagcaaaaagaccttgttgtttaatattatctgttcttacacatctttcaaattaccgaaaacatgagtaagaatggggataatattaatgttagtgattaaggaataaaggaatcgaacctctgtaaatgctgtgtaaaagcactgctctaccattgagctaattccccttccgccttatattacccatagagataaataaggtatttaacactctactggaatcgaaccaatatctactgtttcgaagacagctgccctaaccattgtgctaagagtgcgataactaggttcctcacttttctctttttttttaagcaagtgtaccagcctttaactatattcaaatggctcaagtaagaaaattttgttcttcttttattagaacttgtttcctagttcctaaacttgtacaaagatacatagagactcgaactctacacttcagatttgcaatccaaattcaacagcccgttgtgtatccgctcgtattgcctaagtgcaatagtcgtaaaagacttaaaccggagtttttatcttcactctaattttaactttttctctagagaaaaagttaaagacaaaagagcaggatcgtggaagaaattagttaaaaaagggggggtttaaattattcgttgttttgaggtgctcgaatagctgatcgttggtcggtaaagtacagtgctccttttccccattcgaacataaatccgagtgtaagtacaaggaaaaatgcaactgcaattacaaatccgtagctaccaacttggtatagagatgtagctagagggtaaagaagtagaatctctagatcgaatagaaggaagaggatacctacaaggtagtattgaattgagaatggcgcacgtgtttgtccatatacagggctaaatccacattcgtatgcactaactttttctgtgtcaggtttgtgtaccgctagcagaacgttaagcataagtagaataccagttagaataggaacaaagataaacataagtgtcagtgaagtcattatacgttgaatagtgagagagccagaagatgtgtgctatttaagatgaatgatggtttgaacacgaatagtgcaattgccagagttaatgttgcaatagcaaagctatgcacgtttgttaatgaagcagtagttgttactgctgtttcttgatcttggtctgctggagctgcatcaaagtgaattactcgtacaattcgtaggtagtatgctgcactaataacacttacaataattgctacaattgacatgaagtagtaaccactgtgagtagctgagtaaagaaccatttgttttgcgaagaatcccattagaggtggaattccggccatactaaatagacacgtagctaatgctagtcctaataatgggtttgatcggaattgacctttaagtgagctaatgaattcaatatctgtacctgcagtagctttagctgagtgagcatttttgataatgtatccaaatgctagaagaattaagaaggcattaaggttagtaattgagtattgtactaagtagaataggaatgattcgattgattcttcactgttaatagctagtgctagaagtaagaaacctacgtgtgaaatagtactgtaagcaaatagtcgtttgattcggaattgtgcaagtcctacaactgtaccaataattagtgaaagtaatgatgatactagtagaagatttttcattacactaaatcctgtaccatctgccaggaatgcaaaaggtaatgataatgttactccagatagtcctgtttgaaggataagtaggaagacgaagatagagattttaggcataatagttagccaagttgttacaattgttggtgttccgtcgtaaacgtcaggggcccagttgtggaaaggtgctgcagcaactttgaataggaaacctacaactgtgatagttaatccaattgtaactggtccagtaatactatcatctgttgttactgatagtagactgaagattccttcgaagtttgttagacctgtgtaagcgtaaacaagagctgatccaagtaggataagagctgatgatagtccacctagtaggaagtatttaagtccagctgatgttgctgattctgagtctcggtaaagagcagcaagaatatatacagcgaatgattgaagttcgatagctaggtacattgatacaagatctgcgctagacacaaggaaagtagctccacatgtagtgaaaagaacaataagtgagtactcaggaattgttggtacactagttgattgagcagttgtacttgttagtcctagtttagcaggagcccatggaagaataacaaaggcagcaattgtgtagataaaacagtcaattacttgagtaattgctgttacttggaatagaccactataaatacctacacctgatccaatagcttggatgtagctagcattaaatgataatgctgcggcatagagtagaataatagaggttacccgaattagtagaagtggtgaaatttttacggttggtagcgctacggccatcattagagagaagattcctaatacaagcattaccctgcattctataaactatagaacaatgatttaaagattatacgaataaagagaatcgaactcttaagcaactactgcacttcttcttaagagaagcccgtttacctattccggcatattcgctttgcctactttcacattaacgtgctaattaatgtaggcaaagtcatcgctttgcgctagtctcttttacctcgttttatttatctttagcaccacggtcatttaaattcacgctcatttcttctttatcacgtccgtgataagataaaacaataaattatttcttttaactttactagctcctgctgaacttgaaaattagaaggaaagttaggggggatttaatggttaagattagtgaagttcgattgcatcttttaggtagctacatactagaattgagaatacgtaggcttggatgattgaaactgctagttctagaccaattagtgcaacgaaaattgcgaacgggataagggttacgaagaataccacaacgcttgttgtgaatagttggtacaggaatgtacttaggatttttagaagcgtgtgacctgcaaccatgttagcgaatagacgtacacccagtgaaacagcacgtgctaggtatgagattaattcaataagtactagtagaggtactagtgctagaggtgttcctgatggtacgaagaatgcaaagaagtggattccgtgtttttgtagacctaggatagttactccaaggaaaatcattacagatagtccaatacttaccatgattgaagtagtgatagtgaaaccgtatggaatgttaccgttaaggttagcaataatgatgaagaagaatagtgagtatacaaatggcaggtaaatttcgttagctgatccaatgttgtctcgtaccattccgtggattgatgcgtaagcgctttctagtgcgatactccatttgcttgggataagtttgtggttgttgtttgcgataacgtgtagtcctagtactaggaatactacgatcattgagtaaagacctaggttagttagtgataggttgaattgacctaggataggggcgttaagcccaatgaagcttgtaacttcgaattgttctagtggtgaacatacgataaatgcgtttgtcatatttattttaattggtttccggtaatctaggttgaactagtattggttttggccagggaaaaatagtactcgtcttagcctactacttattcactagttacgctcctttattactttttattaaattagtaaaaatgggcggggataagtgaatagaccgtatttgttaaatagagtaggatattaatcaatgttattgatttattacagttttgtaatgtaaactcgtgtcacgaataggtgtacgaagtaaggaagtacgtaaactgacattacgtatgtaattgtgaatagtgcaaccattgcaaacacgtattggttaacaaagtagaatggtagtagttgtggcatgtctacgttatgtgatattggcccttttcatcctttttcctgctctcttcatacttttttcacgctcctttattttttttataaaaaattaggaacgagaaaaaggagcgagaggtaaatagagatcattgactggagtaggtaactctaagagcagtttcggtcgaagtgaatcaactaaatataaaggttaatagcattaatctttatatctatgcacgtcatccactaataagtgtatggaaagcggaaacaaatgaaagtgtaaagtggggggattaattagttattaaataactagtgaagggctaaaaaaaagcttttattgccttatgattgtgttggaagcatttcgaatgcgtggtaaggtgttggagatgtcactgcccattctagtgaagttgctacttgtgatccgttcacgaactcttgtgagctagtgaagaattgaggtgcaccccatgggttagcgctggccacaggttggtttaccatcatatcccaaatcataaccatgaatactacagtcgcaactactgaaacaattgatcccatacttgagatgtagttccatccttcgaatgcgtctgggtagtcagggatccgtcgtggcataccggccattcccaggaagtgttgagggaagaatgtaaggttaactccaatgaataaagtccagaagtgaatttgtcctagtgtttctgagtacatttttccgaagatttttggcgcccagtagtagaatcctgcgaagattgagaacacggctcccatagacagaacgtagtggaagtgtgcaactacgtagtatgtgtcgtgcattgcaacatccattgaagcgttagcaagtacaacccctgttagtccaccaatagtgaatagcagaacgaaacctagtgagaatagcataggtgttgtgtatcggattgtacctccgtaacatgtagctagccatgagaagattttaattcctgttggaactgcaatgatcattgaggctgctgtgaagtaagctcgtgtgtcaacatcaagtcctacggcatacatgtggtgtgaccatacgatgaatcctagaattgcaattgatgcgatagcgtaaaccatacctaggtaaccgaagataggtttgcttgcaaatgtaggaataacttggttaataataccgaatccagggataatcattaggtatacttcagggtgtccgaagaaccagaagatatgttggtatagtactgggtcaccacctcctgctgcatcgaagaatgatgtgttgaagttacggtcagttagtagcattgttagaccacctgctagtacaggtacggctaggataataataactgattggaatagcatagcccatacgaatagtggcattttgtgtagtgtcattccaggagctcgcatgtttagaatagttgtaaggatgttcattgatccgagcattgaactaatacctgaaaggtgaagagcgaaaattgctaggtcaactgatccacctgagtgagcttgtacacctgatagaggagggtaaactgtccatcctgtacctgctccttgttctacgaaagcactagctagtagcagagtaattgaaggaataagtaaccagaatgaaatgttgtttagacgagggaaagccatgtcgggtgcaccgatcattactggtaccatatagttaccgaatccccccatagctggcataactgcaaagaataccattacaagtccgtgggctgtaaggataacgttgtacagttggtggtcacccgcaaggaattgacttccaggagctgatagttctagacgaattagaacagagaatgctgttccagctagtccagcgaagattgcatagataaggtaaagagtaccaatatctttagcgtttgttgatagtaaccaacgagtcattgtttgttatatataagtattttctcattgtcggggcctagtattgatctagctattcgctagatcataggctgaacatttctagtttataatagttatttactcactattaaatacgataatgttcgaatctagaacgtaactcgtctaaccctatcttaaacttagtacttttagagactagtgtttaaggtgcatcttaagttaacttaaatgcataggcaaacaaagttatcatctacttttaattagttaaatatggactttttttaagctaaaagagtgcgcaaatgcgcctgcgtagatatcaaggcttttatacttactcatttactgaaaaaattttttttagcaagcataaataagtgtaaagaggctgagaaatgctcttgttcgcctgctttgtattttttttttataaaactccctaccaacacatttaaacctttggttttttaggtggataaggggcaaagcatggtaatgctaaattataatcgtttagttcttcgttacttaactatctttacactggtcatataaggcgagaaaaatatagaaaaggtaaacgatgttgtattctaattataaggttaccgcccttgaattagaattaaggtaaataattaaaaatatcaaatgttaacagcactattactaattccacttgttggatcatttgctctacttcctatcgcggaaggaacagcagctaacaattcactaatgaaacgaattgctctagcaacagcaattgttaacttctttgtgtcaattgctctatggggagaatttgacagtagcgcaagtcaataccaattcgtgcaagagttcaacaatctgagcttctgtcacctacacattggtgtagacggtatttcactatacttcgttcttctgacaactttcttaatgcctattactctactaagtaactgggactcaatcaaaacaagcatcaaaccattccttatctcattcttagtattagaaacactactaattgcggtattcgtggtactagatctaatgctattctacattttcttcgaaagtgtactaattcctctattccttattgtaggtatttggggaggtagcgaagctcgagttcgtgcatcattcttactattcctttacacactagcaggttcactattcatgcttctagcaattatggtaatttactacaacgtaggatcaactgacttcacaatgatttcactatcagacattagcctagatggtcaaaaactgttatggttagcgctattcctaagtatggccgttaaaacgcctttaatgccgttccacatgtggctaccacgggctcatgcagaagcaccactagcaggatctattattctagcggggctaattcttaaattagctacatacggttacttacgaattctaattaactttatgcctgacgcaactgcatacttctcaccacttgttcaaacaatcgctgtggtaactctgatctactcatcacttgcaaccgtacgacaaaccgacttcaaagcacttgtagcttactcatcaattggtcacatggccgtagttgttcttggtctattctctaacactattattggtattgaaggagcaatcgctctatcaattgctcacggagttatctcaccagcaatgttcatccttgtagggggtgtactatatgatcgattccatactcgggttattcgatactaccgaggagttacagtttacatgccagtattctctgctctgttcttcgttacaacagcatttaacatggccgttccactatcactgaactggattggtgaatttatgtcactagccggtatcttccaaacatccccattaattggtctacttggagcttcatcaatcgttctttcagcatgttacagtatttacctatacaaccgaatttcattcggtgcttactcacggtacctatcatacacaacagatatttcacgtcgagaatttatgctaatgcttcccctacttgtcgtagcacttgtatttggtattatccctaacgtaattctaggagatcttcacgtagcggttacacaactgctttacgcctagatattctaaatcccccctcatccttccaatagtaataaaagaagtagttattactattttgcctggtgtaatgtggcaggcacatagtattaatattggtaacataatactactttgcgtaaacagtaggggaaataatatagtggtagtatggtgtgtttgcatcacattagccccagttcgaccctgggtttctccaaaattaattgcgcgactagctagatgcaatatcgtctgattacccacaaccccgatagctcaattggtcagagcgcggaattgaagtttccgaggaagaagttcgaaacttctttggggtgtttatgaatgcgtttatcagcttggctacaatagctcctggccaggctcattgaatgatcgagtagatatcctaattggtaaggagcctggctgtaatccagttgtctatgacgttgggggttcgagtccctctctgctcaataaaggattttatagtggtgaatgtgctcaaaaagggcaaaaaatgtaagagatggcaaacgcactcaaatataatgggttcaaggattaatggcagagtggtcgattgcggtgaacttgaaattcattttacggcaacgtaacagaggttcgaatcctctttaatccgagggaatacaacataattaacctagatcaaagggctattatgtaaataacaattcactatttattatggttacttctcagaagtaatcagatgagtcatccctatgctcactcatttacgagtaagtaagtagatagtgaagtatagcactcacagaactttatcacactatttttagataaagtaaagaggcacaactattagtgcttactaatagttaataataaatttgctatgacaaacatcgcacgaacacaattccagagccacccattccacatggtagaaccatcaccttggcctctactaactgcattcgctcttctaacattaacagtatctggagtactttacttcaacggtattcaaaactcagaagttctagtaacactaggattcctatcaacactattcgcaatgatcctatggttccgagacgtaacaatcgaaggaacataccttggagaccacacattcgctgtgcaaaaaggtatcacaatgggagttgccttattcattctatcagaagcctgcttcttcttcagtattttctgggcttacttccactctgctctagcacctactgtggaaattggagcgagctggcctccggccgggatcgaagcgcttaacccgttcgcaattcctctacttaacacagttcttctactgtcatcgggtgctactgtaacatacggacaccacgcacttatcgaaggtaaccgtaaaggagcaatccttggaacaggtcttacaatcctattagctgttctattcactgcacttcaaggtgtagaatacgtagaagctccattcacaatggctgacggagtttacgggtctgtattcttcttctctaccggtttccacgggatccacgttatcattggaaccctattcattgcagtaggtttcttccgattacttaactaccaccttacagaccaccaccacctaggtttcgaaggggccatcctgtactggcactttgtggatgtagtttggctattcctgtatgtttctgtttactggtggggatcataattatcccttactcactttatcataaaatcccctttgctttcactttcctgttttaatacttagcagtaaaagtgagataaagagtcaataaaggcaattctagcttagtggtaaagcactccgttgtggtcggagacacttcagttcgattctgtggttttgccctgcattataaggttataccaggttatttatagctgggcttattagatttattaagttaggaaggtccgagagcaaattaactttctacactgccttgagggctaagtgtaattggcattatgccaaggtaatgtaaagaaatatataaagccagaactctaagttcagggttttgcgaactattactaccgttagtcgatcacctcttcactcctcccattacttctttttaaaaaaaagaagggaggagtagaggattatagatattaatcagcatttatacaaaatttggcttacaaataactggtatacctttaacctgagatgtatgattataaatcatgttaaaagaatacaagcaagcatgtagttttgttctttcccacatttcatttctcttttttccattttctagaaaaatgggggggcagcaaagagaaataaaagaagtggtaggccggcgctaaaagtaggataagaagttatacctaatgccgaaatagtttaggaggttaaaacatgtcactcataacgacataagaaaggttcgatcccttttttcggctatctacttttacacatatttttctcgcccctcccctattttttatcaaaaaattgggggaaaggggcgcttatcttttttacatggaaaaagtgaggagcgtgaaacgaaaggtactgtagaaacggaaatgagtattattttcttttgcctttttgttccttaactttgtcttttttctcgctcctaattttcgaaaaataaaggagcgtgaaaaagtgtaagagggagtaaagaggtcctaactagtaactagttagaagaaacaaacaataaacaaacatgaacaacgtaaacttaaaagcattagacgcacgccacactatgtctgccattagcacagctaaccctttaactagcgtgggtgttctaagcaacaataagcgcccctttggggcgagtcaagctagcaaattaatcgaaaattacttctcacaagtacaagctctagcaagtaaaccaatcttcagtgtgcaagaaaacaaaatggtaatcaacgtattctactttattgctgctaaagaacaagcgcttcataacagtactgtaaacagtctaggagaaattctaagcgaactgtacaaacgtccagttgaactacgactagttcgtctacactatccttacctgaatagctttattcttgctcaatatattgccatgaacacacgtaaatacaatttcaaagccatcatgaattctctattttcagcagtacgagaaagtgtagtggctacaggatcatctgcatcattaccatcacaaattgtcggtcttaaagttaaaatctccggtcgactagctactcaacgatcagttccacggcaaactactcaaactgcacaaatgggtactttctcaagctcagttgtagagaacaaagctaacatggcatcagattcacaagagcctgtgcaaggagttgtagaacacgcagctttcacaagtaaaaacaaaaaaggtgctttcaccgttaaagtatggattagtcaaaaagcttactctggcccccaaatttaatcccctctccactcgcccctcccctcccccaaggggaggggaggggcgcttattaggctgaggtatcagagtataaaagaaatcaaatgttactcacgttaatttaatataaaagtatcacaatcgcctagtttaatcactggcgttatatggaaatttagatgtaagtaatcaaagtgattgttaaggatgtctagcaaacacgtattgaaaggaggtggaaacaccaaaagctattggttctttagtttctgtactattgaataggaaataacaacaatagcactcctatgggtaaacctaatatatcatacgcagcgaactgaaacatctaagtagctgtaggaaaggaaatcaaccgagactccagaagtagtggcgagcgaaactggactagcctatcgattaattgttaatagaatactttggaaaaagtagtccatagaaggtgacagtcctgtatattaacaatagttcgtttagtaagtagagtggaggaaattccgctcgaataagcctgtaaaggcaatagggaaaccattctctaaggctaagtatacgtgtttagcgatagtgaaaagtaccgtgagggaaagatgaaaagtaagtctatgactggtgaaatagaacctgaattagcaatcatataagcagttagagcttgcgaaaaaaaaaatcgctggtaataacgtaccttttgtataatgggtcagcaagttagtagtagtagcaaggttaaacccctagcgaaagcgactgattagacaatgtctaatgcgggaattagttactactattagacccgaaaccctgtgatctttacacctccaggcttataatgggccgaacgggttaacgttgcattgttatccgatgaggggtgtaatgtaggtgaaaggccaatctgacagggagatagctggtactcctcgaaacatatttaagtatgactccaaaagtttataacatagcaggtacagcactgattaccatacgacttaagtcgttcaattggggggttgcaaaactctatcattggtagttaacctcggaattactatgttctagtcattggatttcagactgctcatgataaggtgggtagtcgagacggaaacagccgtgagcatatgttaaggtcccaaaataattgttaagtgaaattaaggaagtgagcgttctaatacaactatgcagtgtgcttggtagtggcaatctgttaatgaaagtgtaacaactcagtagtctaatgaatgcttgcgccgaaaattaacgggtctagacaatttaccgaaactatgccaacacataattcacttgatgtagttatgtgattgagtagaggagcaaggagctcggatgaagaatagtgtttcattatttggactaaactcctgagagaatgctgacatgagtaacgtagaaagaagttataatacttctcaccgaatacgagagggttctatggaaatgttaaacagccataggttaaaacggcctctaaggactgtgactaatgttgcagtctgatgagttaggcaaagtattaaccagtctgatgataatagtcggaatacactggttcaggaaataaatttgctcgttaccgtaccctaaaccgacacaggttcgtaggtagagaatactaaggtgtagagtgacaactgcgcaaggaactcggcaaactgcgtccgtacattcgataataaggacgacctttaattaattttaaaggtgacacagaatcgggagccacaactgtttacctaaaacacaggcatctgctatatgacaatattgtataggtgctgaatcttgcccaatgccatgagtataagtgttgttatacacataacgacacgaacctctggtgaatggcggtcttaactataaggatcctaaggtagcgaaattccttggccattaaatgtggtcctgcatgaatagagtaatgatggctctgctgtctcgcgcagttactcagtgaaattgaattagccgtgaagatgcggtttgtatctaggcagacgggaagaccctatgcagctttactatagcttgttactgtgtctgttttaatcaggtgtagagtaaaagggagttcgagctttccttcggaaagagaacgcacatgaaacacctttactgatttaaagtggacacttatcctgttattacaggaaaaagtgactggtgggtagtttaactgggacggtttcctttaatatagtatcaaaggacttcaaaggtatgtttacattagatggaaactaattggctatgtagagctaaagaaagtgtaaaggcataaacatgcttgactgttagacttataagtcgcgcaggtacgcaagtaggacttagtgatccggtggttccaaatggatgggccatcgctcaagaaataaaagttacgctagggataacaggctgataccgcacgagagttcatattgtctgcggtgtttggcacctcgataaaagatgtcgagtataaaagggtaagttttgctagaaaacttgtatgcaagtaactagccacacgaagtgattaacactttttgttcaacgactagcgataagaaaaaaaaaatttttatttttttttacgccttgattcaccttgactagcttaggctagttaatgatatagtctaaactaattggtgacaattaggaattggcaaagccaatgtaaatataatggtcgactcatcctatcctccaggtgcataagcttggaagggttctgctgttcgcagattaaaagggtacgcgagttgggttcaatacgatgagagtcagtatggttcctatcttctagatagaagaattattaaatttggacggatctttagtacgaaaggacttagatctgcgttcctctagtgtaccaattgttgagtttatacttggcatcgttgggtagccacgaacgttaaggagaagagctgaaggcatataagctacgaaacctaccaaaggaaataatataaggcaagaggtagaccacctctgttcaatttgaacgataggtcacgtgtgttctttttttttggaacaaaaaaaaactcgcaagatcattagcttagtgatactaatttgccattttacttacatctaccatataccaccgccacctccttttccattttttagtgaaaaagtgaatgggggggtaatacttgagtaatgttacatataccacatatgcttcgcgctttgaggtacaccatataaaagagatctaattaagttgcaaatattcagccgttcctcatacaacagttgggcagcttgctagttgaggtagcaagtcaagttggttaaatcttctctctccttgtcaatatcttacttaaggccctgagtaagacagcgatagaaggttatcatgtttcatttattaaatcattgattgatgtttgaggcgtgaccatgaatagaggacgcagaaaggatgaaaatcattgtactggagtttagcactggggtttagacccctgatctcttcctcgacgacctagccaatcgtctaacgtgcaccggggggggttgggatttggtatggctataattgtcgctttcgataatttaaataaatccccctttctgtttaggcattataaacctggaaagcagccatgcacaataaaagtaagtaaaagagtaatatttattttctgaccgtgtgtagaacggtgtgacattgacctaaataatttagtatattattttacatactcaggtggaagcctaatggcaaggcacttactttgggtgtaagactatgcaggttcgactcctgtccatctgaaattcctcttatttaactaatttaccttcactcattttacaagatgaagtagtaagttaacggtaacaaattcatattttgcacactaaaaacaccaagtttttcttatgttgccatagctcaacggtagagcaactcactgttaatgagaagaaggaggttcgattcctcctggcgactttcctatttacacagccaactgtgtaaaaggtacttatggttatgccaacatgaggcagatatactttatttttgtttttcacgctccttaatttttagaaaattaggagcgagaaaaaggaaacaaggattagaatactcgcccttgtgtatgttgacttatattgctcgcctatttttagctgggcaaacattgtatattgttaaacagtacttcagtgtagtcgttttcataaataattatgaacaactttctattagactttgttgcttttggtgcagttctctcaggagttctagttattacatcgacaaaccctgtaatttcagttctatttctaatttctgtattcattaacgcagctggttacctattactattaggtgttggtttcatcggtatttcatatcttattgtttacattggagcaattgccattctattcctattcgtagttatgatgttaaacatccgtctggttgaaattgttagcgtaggaacggaatacacaaaaaaccttccacttggactaattgttgggtctctattcttcttcgaaattctgtcaattgtacctgcttcaacagcttcaagcttaactaatgtgccactagaagtattcaactacattaacggtcttctattctcaggtctacaacaacttgatagtaacagtgtacatgtagcatttacaggaccaacagctgataacagcttcactaacttcctacaaatcgaaacaatcggtcaaggactttacacttacggatcaatctggttactattagctagtgtaattctactacttgctatggtaggtccaattactctgtgtctgcggtcaactcgagaaaactaattaaacccccctctctctttttccctttttttttttcttcgaaaaaaatggggaaaagagatatcatataaaagtgagcaagtaattggctagtgagtttgtgataaaagagtaacaattgttttactggcccttttcctctttttctctccccctccccctattttcaaaatagggggagggctttcacacgttatttttatattactcgctcctaattaaaaaaaataaaggagcgtgaaaaagttaaataggagaggccattacttgctatatctaaagctcataatataacggttagtatacactcttgataagggtgtcgtagaagttcgattcttcttgagcttaacttacctggcaataggccagctattaataatgtgtgacgctccactatatagtcacaaaccattccctttcatcttcatgaaaatacaaggctcctactcttttcatactttttgaggtgagaaaagtggggcagtgggagcagagttaaatagtgatagtggtgttcttttctcttttttctacacgctcctaattttaaaaataaaggagcgagtgaaaaatggcgcgtgaatacctattttccgcccttgtccacagataaaccattcaatcgtttaagacgatttcgcagtagtcattgctactctgacatttctacattattaagctttaagcatattaatgtggttagtataatcaaaaatatgcgactattaaaacgaaacactcttctaggtcttgttaacagttacgttgttgattcaccacaaccagctaacttaagttacgcatggaacggtgggtcacttctagcaacatgtctaggaatccaaattgttacaggagttatcctggcaatgcactacacacctaatgttgacttagccttcgttagcgtagaacacatcatgcgggatgttaactacggatggatgattcgatacattcacgcaaatgtagcctcattcttcttcatcttcgtatacctacacattggtcgaggtctatactacggatcatacaaatctccgcgatcaatcacatggtcaatcggagttattatcctagttcttatgatggctattgccttccttggatatgtactgccatacgggcaaatgagtctatggggagctacagtaattacaaacatgctgtcagccattccatggattggtcaagattttgtacagttcgtctggggtggattcagtgtaaacaacgctacacttaaccgattcttctcactgcactttgttcttcctttcctactagcggctcttgcggtagcacacatgattacactacaccaacacggatcatcaaaccctcttggagtttcatcaaacgcggataaaatcccaatgcacccatactacctattcaaagatctagtaacaatcttcctattcttcctagttctagcactattcgtattctacatgccaaacgctctaggacacagcgataactacattccagccaacccaatgcaaactccaccatcaattgtgccagaatggtacctactgccatactacgcaattcttcgatcaatccctaacaaactactaggggttgtaggaatgctagcttcacttctaattctattagctatgcctctacttgacacatcacgagttcgaggaagccaattccgacctctaatgcgattcgcattctgggtattcgtaactgatttcttcctactaatgtacctagggtcacaacacgccgaagaaccatacattacagttggtgcattcgctacagtattctatttcgcttggttcgtggtaatcgttccagtgattggtattgttgaaaacactctaatggacgtggcaactacaccagtagacgcaaaagaaggtgcaacacaaccaacaacatcacaataaaaaaacctttggtttttttatagttatcaaataactaatcaaccccctcttccatttgcgaggtagtgtaacggtaacacagtagcctcatgagctactatacgaggttcgactccttgcttcgcttatataactaattcacagttagcatcgtaagcctaaatgatctctgagaatatgtctaccaatttaggcgcgcaccctaggtcctttcgtatataggtaatacttctgcccttcacgcaggcaaaaagggttcgattcccttaaggactgactattcatataatggaataatatattgcaatccgcccccatggtatagtggcaaacacgtgactcttgtaaagtcgagtcgggagttcgattctctctgggggtatagccatgtttagccaaaaaaaaaggcttttaactaaaaggaatggataaactttaccacataattatgtggtaacgaggtcgtcgccatgatcaaggaactcttggacacccgggtccgacctgccatccaggaagacggcggggatatcgagttcaaggggttcgaagaggaggatgggatcgtccggctcaagctcaagggtagttgtcggggatgcagctcgagcagcgtgaccctgaagagtggaatcgagaggatgttgacgcattacattccggaggtcaagacggtcgagcaggtcagtcccttgggcgcgcgagaatcgcgcgcacgacgagcacatcgaggtctttggctgagttttcgatcgttgttgcaggtcttggacgaagaggagatcatcgcgctaagcgagttcaacaagctcgagaagcgtctagcagccaaaaagagcaaggacgccgaagagggagggtgagcccaaacgaggtcgtatcgtctctttgctcttcatctgattcacatttttcatgcccagcgacggaatgtcacaatacatgtcggtttaaacgagatggacgatcgatcagcttgtactgtatctataaaccaacaccaaacgttccaacgaatcccattaccgtgctcttccttccgtgaagctggagtccgaatttggcatcgtgtagatacatgcaaaacacgtccggtgctaaggatacaacagccttgatcgaaggaacgggtcaatctagtctcgaattcgctgcgttcgtcctgctgaggtcgtagtcgatgaaccgccccagaccgaaaatcaagaacgcgatgatgctccccatgatgatgaacgtcaagaatgggtgtcgagcgacgattttctgtaggttaacgggcgacgttagctagaagttgcttcagcaattgtcgagcgagacttgccattagtcccatgacgccgtcctcgaattgctgcgggtcaagaagcgttcagcattggtcgcgtccgatgcagctcacactggaactcaccttcgatcccctctctagagccgagctggctgcttttgggataaggaagtgctgatacatcccctccaatgtcgaaaagatactggccccgtcaaactttagggaatctcgctccaacgttgtgtcatagtattggttgagctgtgacaattcgtttcagcaagacgagtcacagtcgcgaggtatcgatcaatcacttacaggaggatcaatcaggacgacggcgggaagcttcttggggttgacgctaagccaccagtacagagcatcagcgatgccaatgtcggtacacaggcgactcgttcctcacccataagtatgcttcaaccacttcgattgcctagatgcgtcggtccaaacgaaatgaacaggttgcgagaaaggtctacctcccttttgccatgctcgagcgaccttggtaaagtaagccagatcggaatcgaattctttgcggttcttgctcgcaggattgagtgcagcgaggacgatcaaggctctcgtaggggtgttgaaaagctcctcgtgattgtctggcgtaagttcgttcaccaaagggtacttgtgcgacatgataaaggtatcgatcgtttccgtcgtgggattgccgtcgttgaagtagagtatcgaggcgggcttgtcggcgtggtctttaaaggccgcgaggacgctccctttcgtgctgtcgatcttggatgaagagaagatgtcggggtcggaagattggtagaacgagacgtcgccggctcggaacgcgctagtcttctttagcatggcctggttgatcaacgaccgtcagccgagtctcgatctcacaatcaccgaggtagattcgtaccaaatcactcggtttcgatccgaaagtatggaggaataggaaatacacgtcctttcgcttctgcaccgttttcaggtcttcgtgatcaacgtgatggagtgagggcctgggggtcatcaagatcagtttcatgcgctaagaccgagctgtcgtacacaaaaacccacggtatgatggcgttcatggcgaattcttgcatcttgttcaacttccgagcgccattgtaagtcttggcagctcctgaattgtacctggaggcacggatagcaggctgagtatgccgagtttaccgcgtgagcaaggttagaccttacagtatcagggtgggatatccctggatgcccttcttcttgcacaatgcaggtagggcctcgcagttgacctcggctacggcgagcttgtccttcatggctcctcccagctcgctccaggctgtgtagtgatgaccgtgtcagccgagtcgcccagcttgtgtctcacctattgctatcttactaggagccaacttcttgcaactgtagccgcgatcatctgatcagtcacacctgaacgttcttgccgccgcttcttccacttactgtccacaccatggtgcgtagaatttgacaaagaccggtccatcctggatcaacctctccagctcctcttcacccacgctcacgctagtcccctccgcgttggccgtgacagccgcctttccctgccctgcgtcgttggccagtacgttctgtgctaacgacctagcgaaatgtcgggacttgtcctggatgtattctgtgaggtgggagagtgatcggtccccggtgtattggtcgacttcttgcgagttttgataaagctttagttgagggtctgtataagcaggaagtaaggtggttcgacggcatcctttcagttttgtatatctttcgaccgattcaagaagttgctcacagaacttgatctcgtgcgagttgcaaagatctgcaataggcggtgcccgggaatgcggtgagtcccaacgtacgggtgagcgggacgctccaagtcgctgcgctcacctccctgaacctgacaattgatctgtccaaagaacatccctcggctcttctccagctccttgttctcttccaacagctgttcgtagaccggagcgaaagctcggcaatgtccgcctgttcaaacatttatcagctggatcattcaggtcacggacaatgggacgacctacatccgggactaaagtgctcgacaagcctgtaagggatcactcgagaggtcagtgattcacagcgggacagcgtcggatgccataacttaccacattccatctcgggtcttctcgtcccaattgtcggcagtgagctggtgagcatgttctacagtgcccggcagagctgctcgggcggtgctaatcaagagcaaacctgcagtcgcccacctggcagcacttgcgaacatggttcgtatttattatgaacggacagctggactgattgctagtttggtatcagtttgagatcgaaaccggcctcgcaatcaacgcttcgtaaggaatatcatgtcgagctcaaggtgaccctcgcctcagaccgacgttccagtgtggaggccacttagcaaggagagagttatggaaacgaatatctattctcgagtgcaaagccactgacggcatcgaaaccttattcgcgttcgcaagttgtgtaccctcccgacagaacatctgttccgtctacacttccagacggtaaagtgaacgataccggcctatcatgcttgcgatctgatcatgtctgccttcaacaatcctggcatccccagcaatgcggtatgtcctctacaaggtataccctgacgaaacctgccgggcaatgcccaggtgacagtcgtcgagaccggtcccaatggacacgagacaaggtaaaacattcgattgagtactgcagctgttatgtgttacaaagtcggagtttccgaaagtccgtctacatctaagtaaagcactacgcaatacgaatgttcgcgcgggggtagccagtttgcatcttccgccacgcagccttcgctcgagtgctatcgtcgtgcctactgagaacccgttcagccgactgcccctcttcctctttccctgcctttacgatgtgctgcattccagatctagaattgagtatcaagatggatctgtcgtcgattgcacccgtccttgtctccactgtcgctttcgggcgggcccccttcgcttcctcctttgctatcttcatgaattcggtgtcgtaacaactttgggcatgtccttgttcatcgatgacagccagagtcttgtgctctgtagtcgttgttcctggcctgagttctccctgtggctccgcggccggttccccagagagctctgtcccttcttcgccgttgccagccatatacgaagcgaaaaacagacttggtcccaaggttgtgctgtccctaaatggcacggaccgctcaaagccttcaccgtccatgggatggttggagatcctttcgaatgatcattacataggaaaccgtctttcccggtctgtccaaaagggtgctctgcgatggttacggggacagtattggtcgtcgaaaatttggaaaattccggaggagcatcgtgcgagcttgggccctgaaatgaagcacccaatgatcccaatgttgggctgtctatatcgttgtacgagagaagcaagagactgtaaaacgggtgtctgccgcgaaagcgaaagactgaactcctctgaggatatccttcgacatatcgttgagttgagtgttgggttaataagaatttgtgtacggtgtttgattctcgccacaatagctttagtgcgaatctaatctgaggaacacgatggtcttacatacgttacttaccggaaatgacctcctttcttgtggcgcccgaggaagcagaccggaactgaacgtgcccatgtcacgagtcggcctcgatggcgtgtgctggatgggcgatatgggagacaaaggtaggcatcaagccgatgccgagaagcgggacgtcccagtatctgagcatggtatgagctcgcgtgggttatgaaagctagaatttgtcgttaatggatcatcttcccggctaacaccatgcggtctgctcacaagcatcttggccgaaagtgaggcagacgcgctccgacgataaatcgtgtgtcacttgctcggggctcggtgaggaagcaagtcagaccgaagaaaaccacatgtcaaagaggacattgtgattctcggcctggaagtctgcgttgcaagcaataatcatacgacatgaactgtatgatcaataaatcgatcacggaggatagaacggggagtctcaagcgaagaaaagcgcaatacaaccgggaagggtaagccaagccagatggacctttctactctgttatagactgtatgaaaggctaccagggcccggcgggtcgtgaaacgaacctggctggccatggctggcttcgttgagcatggtcgtccttgaggttctggtcttttcgttgtctagtagtatgtagctttgtcccgtgtctgtctttcgcgctcggttgaattgataacgcctcagttcgtgggagactcgatgtgcaacggtcaaaagctttgcaaagcaagctcaagaatagtacatacaaatgtagaagctcggcacaacggtcgactcggatgatacttgtgaggcatttccgcagattccctcgcagcgaattccagcagtatcatcacgcctctgaccttccgctcaaagattgttgtcggggaactcctggatcatcttcaacgtctcaagttgctccggattagcgaaaatcttcctgttttcgtactcggccatggctgctttgacagacaggtgtcgctcgtcaggcttacctccaccagagacgtcaaatctctcaatgggctgaggcttggtataactatgaaggacacgccaactgctcaagttgttccgatcctgctcctcctgtaaggacttcttgagcttgccagcctcggtgaatgatttgattcccgttcgaatcaaactatcatctcgatacaatgaaaagctggctgtgtctcgaacggagttctcagatccggatttgaagtcagtgccagttccttttgaaaggtcaggcacctcggttccgtccagactctgtccaactgtttcgcggagtgcgatgcgtcagcttccgccacgtatgaaggtcgaggttcctacatacttgtacttgggtcggccatgatgaagatgtttcgattggttgctcgagaatacttacgattggttgctgtcgcttacaacggagatcattgggggtagcgaaatggtcgcgagggggctatcaatatatactaaatcttacgttcgtcgtagctatgagcggcccaacgttggcatcgcaccatcgctatttcctttgtcctggcaccgatggcgcgaaagtgatatcgatcatgggatcatcaactcattcacccatggttctcggtcggtcgatcgaccctttgtgctgagccgatgcccgtcacaattatggttcacttctccagagctacctacaggcgtcggctgtctccctgccgtcttgcctctcgttgcaagtgaaaggagatctccctgtgagcttccggatccgtcgcaaccacgtgacaatcggctgatgtcgtgatacatggcaccgccacgcatatgtcctttgaccggcggtccctttgttccctgcacgtgtttgaacatttgcgtgatatgattcttcatttccgtaggcggtagccatttattgtcgcgctatcgcttcggatgtcactctgaagcgcaccatatgaccacccgcgcatcacttgacgctcggcacctctctctgcgcgcgaagatgttataccgacggctagagacgaacgcgttggccaccgtgacatcgacatgtttgggcgttcccggaagtagcacacaaaataccctcaggcgcgctgaaacatgtcgtgaaatgatgggttacaataacaatgcttcgaccaatccatctcgggcacaagctcgctcgcaagtcacttcgcagcttgcctgcaaagaggcttcaaaagtctgcgctatcaaggctcatttatttctgttcctgctgcttcttcgcagcggcctcctccgcctcctgtcttttgagttcggcccgtctttgaagctcagcgtactcgaatgcttcggccgtagtgtcaaatatcctctcgtaaggagttccggcgccgaccgttatatactgctcaggctccggtatagtaccggtagatgcagatccaggtaggcctgtccctgtgaaagaggaggctgtaccagaatctaataatgccaatgatccaagactcgatcagcgctgattgataggcatgctcggttgtggggtctactgactgtaggacgaatagtctcgcgaagatggagcggacatgattgagatgttgacgatctttccgcaaggtcaaggttggttgctcgactcgcaagtcaatcttgcccatactgaagggcaagatgctctcctagatataagtgtgtgcgcgcgaaagggctgtctgccattggaggctgagacgaggcagttcctttatgtgcttctccgctttatgccatcggcttgtcatgttgcgacataccctctacgtgtcaaattcccgctttcgtagacagaaaagaagctagagatagcgcaacccgatgtccatggcgagctggttgccattagacacagatcctgcgcttaatggggcaaacggccatatcctcggggcacccggcctggacgtcattaccactctccatatgccgtacaccatgccctcgggtttcctatggttatcactaagaagcgctgagatcgtgatggccgagtcgcatcatcttctagccggatggcgaacttttcagtcgccaccacgaggcgtttgtcgacccttgtccctccagccctcttggcctgctccacactgtttcttggccgaaatgccagcccagcgtgggcactcgagttcacgaggatttgtgcgtggcataaacatctcaattgtcatggcgccccggctcgattcgcctcgacgctccgtccgacgacatgctcgcaacttctggcgaaacgcctgaccgccgcggtcgcgatcaatgccgtcagatgcgtgattttcgccgctcggcatcgatcggaagcggatttccgtctaaccgaggagatgagctgttttcgccacgtcctcgcggtgccggaagaatttgccggtgagacgaaggggcggtgaaggagagagtgcgctgttttcgccatagagctcgatcaaagggaatcatcgatgtcgtctatataacccaggttcgacctcgtcaatattcaccacaaatctatcagctcgacagtctctcctcttcaccaacaatctcgatcaatcgtctcttgcctcgcaaacaaacctctacactaccaaccactacctcaacccaaacgatcaacaactacacaacaatgtcgtcgtgctgtcaatcccaaaaggccgagatcaagcagacccagggcggatgctcgtgagtcttggtcctccgcctcgacgcccgctcgaccttccaactgacgcgacctcatttctccttcttaggtgtggaaccaagtgtagccccatctctggctccgaggcctgttcttgtcccggtcaatgctcctgtgccggctgccctaacaggaagaccgaggccgtcgactctgaccccaaggagggatgctcgtgagtccgcgtttcctgcttcctatgactgtctacctcggatccattcgctcatcacgatttactctcgactttggatacgcgctcgtaggtgcggaaagatgtgctcgtccaccggcaagggatcttgtagctgtgacgactgcgcctgcaagggttgccccaacaaggccaaggaggagaagaccggctgcaagtgagtccatccccctacctccccgggctatcccttgatactcggagattccggacaccaggctgacctcggttccttatcaggtgcggcgagaagtgtcaatcttgtggaccggagagctccaagtgttcctgcgaaggaagctgcaagtgcgctggatgccctaaccgaggataaagttgtcgtctttcttcttaatcaccacgggttgatgcaaataggaagaagatcaggaggatctggatgcggatgaggatctgtattctaggtccaggagaagcttgccgttagtccaccggcggttgggcttcaggccgagccgtcttgtttgtatttgtacaacgtcttccctgcatacacaattgcgggagaccaccattaccaccattattactgttactgctgttgggacgttctcgtcttcataagaccaggatgatgacgctccaatcatgcgatcacttggtcaggatccgtgatcagagtaatagagtgcggacatgcaaggttcttaacgagatcgtcggtgacctttgttagcgcgtcgagtctcgggtcagaaagttgggaccgggatgagcaatcgaagctcgtcgatcaccctttccatgaatgcaaggcttgcgatttatgatcgttaatagacgatcagtacgcaatcggttcggtctcgatttattcgctgtgcagacctcgtgagccggtcatatcgccctctcggctcatcatgcaagcgatcccccgccctgcgtcaaggctagcccggctaccgaggaccttgaccgatctgcggcatcctcgctcaatccgtatcctggctaggaacgctcgaccggtctcttcgaccgatacatcctttccctccctcatcattgcttcgagaaccggaagtgctggtacccgcagctatagcaccacatcagaaacgcacgcgggaagatcagctcggaatgacaaggagccgggacaggaggacgagttggaaggttgggagacggtcatcgggctcgagatccacgctcagatccggaccaactccaagctgttctccagtgagccacgaatgacgacattctatttcgaatctgaaggccctgatcagtctcttggggatttcgacaggtagcaggacgtcgttcgaggaggaaccgaacacgaacgtcgtccccttcgatgcaggatttcccggaaccttgcctgtaagtagattgacaggcttagctcctacgcagttagcagacagtagctaatttgtatctcgacgaacctctgtattaggtattgaaccgggaagcggtggaccttaccgtatcgacagctctagcactggattgcacggttgtgagtttctgatgttgagtagccctctctcctagatatctgccgctgacacattcggatcagaaccccaggtcgacttttgatcgcaaacattacttttatcacgatatccccgcatcgtatcagatcacgcagcattacagcaagtccactcaatatacgagttcagaagcgccaagggttgaagctgatctcgtcctgcagaccccatcgctaccaacggcaagatcgacctcgctgccgacctggaccccacgatcgaccgggatgtatccgtacggatacaacagattcagatcgagcaggacacggccaagtcgacaaagctcgacgatggaagtacccatatcgacttgaatcgagcggggatgggtctcatggagattgtcaccgaggcggatatgaggtacgtcgcggcacctcatgaaagtagccccagttgacttacgggaagatgtgtcatagatcacccaaggaggctggagcgtttattcgcaagctacaagctctattgaggaggatcggggcgagcgacggtgatatggaaaaggtatgcctatcactcggatacagctggaagatcttgctgactttaccgcgtagggttctatgcgagtcgatgcaaacgtttcaatccacaagagtggtacacctttcaatacccggtgcgagataaaaaacctgaacagtgtcagattcatgatggcagcattaggtcagtcaccagcgacaactccatctcagaaactctactgattcctgtcatgtatagacaatgagcgaagacgacaccttcgacactacctttcgcaatcggacatccctctcagacaagagacgaggggcttcgacgaagccaagggagaaacgttcacgttgcgaaccaaggaggaagccgaagattatcggtacatgccggatggtaacctcggcccgatcgtgatcctgccagtaagcgagcctgtaatagcacgatacacacagtcactacaaaagctgaatatggtctgcaggaataccttgacagtatccgtcaaagtttgccagaactacctgatgatattcgcaagcgtcttcccgaggcgtacggtatttcgctcgccgataccgaggtgctgttggcgatggacgatgtcgaaggatccggcgtcgcttatttcgaacgggtagtcgctagcggaacggcagtcacgggaagcggggtccgggacggtaaacaggcggtcaactggatcgtgaatgaattgctaggtagactcgctcgcaaaaacgagatctggacctgggacagggttcctcctcaggtgctgggtggtcttttgacgctggtagagactggcgaaatgacaggtgagacaggtcatagaggtcatcattgtttcacagctgatgaatcttttgacatgccccaggcactgccgccaagaatcttctcaaacatttgctcaatcaacccaatatccatgccgaaacggatatcaagctcttagctactcaattaggcctggttgtctcggcagaaaccggcaccgataccttgaaggaactctgtcaatccgtgattgaccagcttccagctgaagctgaatccgtacgaaaaggaaaggaaaaggtcgtcatgcgtctcgttggtcaggtcatgaaggatagtaagggtacggcggacgccaaaaaggcccgtgaggtgcttctgtcgatgcttgtaggctaagccgcctctcaaagagccatgaagacattgcgatcgagcgtcttggtagtcgcaactagatcctcgccgaccgctgcaactaattgagacgccatttcgagaccctgggcagggcggcggaagggaatcgcctgcaggcagatacgttcaaacggtgttgaccaattatttcttcattcagtcgactcactttcagtagcgtaagctgcccatccagaaacacgaccagattccgcaagacgtctttgctaaccaattgaggatccttaaaccctggcggtggaggactcggccatgcatccgcgcctcttctcgaggcctccaccgcccctcttcgaccgcccgactttgacgaaccgtcgttctggctcgtaacaatggggccgtcgaatgttttgtagccagtcggattcgcgtccagaagatctctgacgctgtccaaggggtaccaagcatttgtgccctgtacaagacaacacgtcttcagcgaaggcttcataaatctagccggactctcaatacgaacgggatcaagcaagtacgacggcgagtattcccccttgtagcgcatcttctgacaggaatggatgtagaagcctggggcgttcgtatcacttcagcagcgaatttgcatcaaacgcaactgattcacatacccatgtacagccgacccgcaccttctactccagcttgctgcaattccctcgccagagctgcttcgcgcagtgcggatagctggagtcaaccacgccttgttcagcctccaaagttggacgtccggtgaagctggctgcttaccttgcctagactggcccatgcgtagtccgggtcccagacaaagtagacgctcgatacacatccaggaaggatatcgatgacggagaaggcgacgagcttgctgtccaccaaccagactgtctcagatccatggtctcagcgatttggggctatcgtagtttcacgatcgacatacgctgatgataacctccgtaatattgtggtagatgttctggtacctcattgccctctggatatctaatcttctgccactgcaaagcggtttcgatattcagcttgaatgcatagtgcgattgacatcccgttatttacacctaatggattcttgcacaagaacctcttgaaactgctcatcgagtttttccccggtttatctccgtgtactgcttgttgatacttgtcatacagatcgaatctctcctgcgtgccttctgccttcaccagcttgaccttttgtgcggatgcttgaatcttttagcataaccccgagctttgtccagcttacgtgtgtcgtcaactcacctcgaaacgatgagcagagttcggccctgctaccccccattctggcgcgtgaagctcggacaggaattcaaaggtcttgttatcgttattctgattgccctttttgcgttttcgattctcgttcgggacgctgctggtcgaacccgtccggtcgcgcttttgagtgttgctatgttgcgctctaggtcgcagtatcgtcaagtgttgcgagagtttggcgaacacattgttggcttacgtttctgctaccagccccgtaggcttgttcgcgctccgctcgctcctctcgatctgagatctttccctagcaacggtttctacttttgctgtaccatccccatcgatgacaaactttttccacctatttagcacgtgccgaagtttcttatctttttccggtttgaacgccatgacatccaagcggatcgtcaattgcgggcaacatgtgttggcattgtccgggctgagtagcgacagcggtcaattctcatgtacgcaaccgttagagtacctggctgctcactgatagacgtaatcgccggatcttctccagccccggtcgatcaagtgttggtatacctgtgagatttctctttgcttagcgagttgcggagaatgagtgctgtgaactgaaacccactcgaggcgataattgcggagcgaccactacgccggtatgagttagaccctttcgcaatctgggtatcccacctacgagcgggcttactaccatagctcttgctgctcgaagctgaacttctttctcccatagccgagcaatatccacaagaagatgatccgtaacctatgaaccgcttgtcacgttagcagtagtcacttgtcgttctggtcaaagttagctctggcttaccgctcggctccaggagagtcgggatctctgcgtattcggtcgcctgagggtccgatgtcgacatgctgctcgagtcttgaccacggctagctttggaattcaggtaaataaggatatcagtagtcttcgcctgaatcttgaaagggattcgattagggtgcagtatgggaagggtgtgtgagatttgatgactccatgactccattcctggactctgcgtcgagatgaagctggtgacgaatcgtcaacaaacgcggatcgattcatctggaaatttgtcaatgacaggcggacattcaccaagtggtagcttgttagaaggggactgtggtagctttgatcgccatgcttattatattctggtgtactacttgagtaagtatcggtacgatgctatagagctatagatacaacggttcattctcatctagttatttggacatctaaagtctatatgtatattcgtccgagcgggcagtctcggtctagacctgctccttggtggcgttctcggccacgccgacggcatcatccccagcggaagcgatggcaggtgcgttgatggaagtgtcgaccggggtctcactctcgaccttcttggcagcggcggaagcggccatggccttctggatctgaaccggggtcattccagccttgagcatctgaccgatatcgtcgccgatcctgccgaaagcggtggatcgcctgatctttcgtccgtagatgtaaaagatgaagggcgagggtgcgaagaggagggcgagacaggcgatgagggtaccagcccagttgactccgaggttatcaaacatgcgcttggtaaagagcgggaacgccacaccgaagatgcttcggacgacggtgttaccagcgaggaccgaagcggcaaagatcaggtaggcgtcgacgagataaccgagtacgccaaggaagacgaggaccatgccacatccaaaggggacggatccgatgataggagcgatccagtggatgtgggtaggtacggcggtccaggcaaagatgaagagtccggcagggagcataacacctccgaccatggcggtgaagagcctctcctcgggtaccaaccagccgccctgtgccttgagcttgcggctgtatcgcgggttctcgatgagaacgacatacgccagagcgagggcgacacccacggcgataccgataaaggcgagtccgccggtaccgggggaccaacctcggttctgctggaacacgatggggaaagcggtgaagagcatctggagacggatcagagtgagataaggtcagtctttcaattcgattgaggcccggatgtctcgacgaatcccaactcacgtagaggatggcgtagatgaccgagaggtagagcgccatgagagcaacgatgggctccttgaacaacaagatccagggcatggcgagcgccttgccgaacacctgcctagcctgagtaggcgcggcagcgtcacccctgctcaggtagacgtccccggtgatcttggacaatcgcttggcccgctttcggaggatgacgggtccgtaggtctcgggcaggaggatcgcgccgagcaaggtgaggaatccggaaaagaagcagagcagtccggcgacccatctccaacctcgatgttcacccaagaaccctccgatgatgggtccaatagcgggacccatgaaaggagccgaagcaaagacggccatccctagtcctcgttgtttggcctcgaaaacgtcggcgacgacacccccggcgttggtcatggccgaagcaccaaaagtaccggcgaggaaacggaagacaatgaccgtggcgagattctggctggcacatacgagaccgttgaaaagggtgaatccgatgtaggtgtagatgaagagggttcgacggccgtagatctcggacatgggagcccagataaaaggtccaaggacgaatccgaggacgaaaccggaggtgactatcgacaggcgagggagactgtgtcagcatggttgttgctatgaaacagcacgagcctgcaacgactcacccatgatgtagctctcgatgctcttgcccggaaaatcgacacgcatatcaaagacggcagcgctcaacatcgaactggccatgctgactcccaacgtcgacatggcggccaggacgacgatggaccacttgtaagcccgtccgtatgtcatggggttctcaacgtcgacaaacttgtccttgtccccctcgaccgaggaggagacccagtcaatgaggtaaggttgctccttggtccccgcgccatcgtaaggttgctcgatgatccgggaataaggagtggtctttctaacccagggtcgaggtttgagggtgtggtcctggtacgatccagctttggcgtggtagtggttgtgattctcagcgaccgtgatggacgacgccgacgattgcggttcttgcttgtctacttgagacgacatttgagttgaccggcggcgggaaagaagtggcgcgtcaggcagaaatgtgacgttataggggtcgatttctgattccgcgggttaagcgaaaactctccgatcaagcgaggtcgatcaggtggattgtcaagagttgcagtgatgatgtctatgcagagtggcgatatccacacctggatggatgtcactatgagaccgccctagccattggctctctatataccccacctccagcccgtttgaccgatatcgaccggaaaaagcttgcaaacgacatctcgcccttgttgtttgatgccaaaaacaggcccccgtcccggattgtcggtagttgccgctagtaatttcgatacccggtgcgcggcgatagcgcgctggtgagctcggttatcttgaaaggatgccgagaacgcgttgaatagccggttcccgggtgcagcccgtgtcaatggagagttcgccgagcccgttcccacttgagtgatgacgactgatagatttgatcagcccttcatcgccgttcttcttactaacccattcgattgtttcgatacgtctagtttgatcagctcgagatgactcgagcatgtcgattgatcatctattgcaaagtggtagaaggtccttgtgactcgcgcgttaccgccttgaagcatggcgttagacctcgacactcccatttgtaaggttcaaggccttacacgtaattttggtttctctcgaggattcaggagaccaaggtggaaggtgggaaccgtatccgtcttcaggattccaacgttcatatctgaacgtggatcgacgctcgattgacccatgatcccgacaagacgatgaccgaaccggtaaaccaggtgtagattcctttaatcacgtgacataatcggcgatggtcagctctcgctgatgactcgggcaaggccgcgagaggttcagttctgggtaggcagaaacgaccttctccttgtacatagtccagcaagatcagcgattgcaagtcctacctcgagtggtctatatccagctgtttgacgaagtccatcaaatcggcaagatgtcacctgcaaacagcattcgcgcatcagtcatccaagcctgcacggtcgggtatgacctcgatgcgacactcgaaaagatggagaggcttgtcaagaccgccaagcatgaggacgatacccaacttgccgtcttccccgaagctttgtaagatctcatatgacgcgctcatgaagcattactgtaatctgaagcagcctcgattgacacgtcagtatcggcgggtaccccaagggaagcaccttcggatgcgtcattggtgaacgacataactctggccgggaagattacctcgcctactacaactcggccgtcaagattcctggacctgcgatcaccaagatcgaaacgatcgctcgagagtcgggggttttgatcgtcaccggcgtaatcgagagagagggcgggtcgttgtactgcagtgtggtctgggtgcatcccaccgaaggcttgattgggaaacgaagaaaggcgagtataccgccactggctccggaccagaaagagatatccttgctgagatgccggtgcgttctatacacagcttatgcctaccgcctctgagcgcctagtctgggctcaaggcaacgctgaagatgctcggctcgtgaccaccacgctccccggatcctccattccccaacccttgaaagtatcggcgacaatctgttgggagaattatatgcctctctttcgacaacacttatacgacctcggaacacagatttactgtgcacctactgtggatggtagggaggtatggaggaacactatggtccacatcgctctcgagggaagatgcttcgtcctcagcgccaatcagatgagtctaccctgtggtcgctgcatagactgaaagagaaaggctgatgtgagatattgccgatcatacttctctcaaggtaaagaccatacgcaaagcacgtcgtttggcgctgggggcccgtctgcggatgaagacgtcaagattgctggcggtagcatgatcgtcgacccgatgggcactatcctggcgggacctctacgagggaaagaagggcaagttcgaacgtagaaagactgtctcgcactcaatgctgacccccggttcatttgtagtattctcactgcggagctcgacctggacacgatcatcagggggaaattcgacctagacgtctcagggcactacgcaagaaaagacatctttcaactcaacgtgcgggatcgttgagccatcgtcggctgagcgatcgctacaaaacgtgtcaaacggctcgatactcgaccgctccttcgagggtcaaatcgggcgagagtacgctatgccaagcaccgtcaacgtcaacatttctacctacaaaccggcatccgctcagagactgtcctagctttgccagatctgcgatcatcggttgtaactggtcgcaacgcgtatcatcaatgcgaccgaacgtgccgacgcgttactcgggcatacttaccagtgcttgatcggaccctggctttccagctgcgtgtggatcaatatgaaggtctttaccagaccgagcatcaggttgatgtgcctgcttctcgagagtgttgagtcgccactgctcttgcgctcctgtcaagtccataaatccgaatttcccccaaagcgtcgtggtctctaaagccacccaaggctatcagttggtgtaacgactaggagtaagtatgctgtgacatgccttcgatggagtctaggaggatatatcgcttcatctgaacgctataacgccaaccccaagcaagcaggagcgaaattaatcccttgctgcgaaatttctcggaaactatgatccagtcgatgtctaccggaagctgacgagtcagcgactgtaaaatcttattctgccccagcccaggctcgtactaacagatgaagtcgccgaactgcgaaagctgctcatcgtaatgctcgatgtcggccaagaacgcatctatcacttgaatatccgcagctggccctcgataatacttttccttatagggcacgtccaacgagtcgtccaacgcccaactacagaaggctacgacctcttgtgttttctgatccacgatgacgtcgagcctacggacaggcgaattcagccactgttcgagcacgtgccggtgagtagaggagagttccgaggcgtccttgatgccggggtacagtacgtggaaaagcttggagtggtagaaatcgttgaaaagtgcgacaagagcatccaggtctccctcctgcgccttgcgggaaaggtagcgttcaggccgatcatcggtagtcatttcgtgggtcatcttcgagatgtgcgcaatgtggatatcgtagatggtctggcctggccgccggacagccgtttgatctgcaatctctttctttaacacttatatacgaattcggttcagtagcatgaaagttttgacctctctcccttgtctaccaagatatccgagatgcctttgatccctttgttcgcttgtttcaaagtggtatggtgtatattacgtaagccaatttgggaccgggtgtacatcgcctcgtaacgctacaatagacgacctgatcggtctcctctatcgaacctagtcttgtcaaagtacgtcgcacgctgtagatcgaaaccgagatgatcagctgcgccaatgcacctcatcctgccgcaagacgcttacgacttctcttccaccgaaaatcctgccgtcgagcatcttgaccgtctgccaagctccagcaagaccggaaaagacgacaaagattcggagcccatccgagggttcggctggaggcggatccaccacatgcatcaccacgcgctcgacgatactaagtaggcggggcatataatcaatgaccgagcgaagattctttgtcgcagagcgcggcgactcacccgtgcttggcgcattcatccccgatatctgcctgcaagtcctcgtctgctaagtctggactagccaacacgtttgagagacagacgacctgactcggctcgccaaacctttccttgtcttcttgctttctcgtgtcctggttcgaattgatcagcttgcccttggacgagctcgcctggacccatccgcctcgactcttcttcttcgatgggtcgatgttttcagcagccaaggcgtggatgattccgtctccctgtttaccgagtccttgaccttcctgatgaccccatttcttcatcactgcaggtcgagcggtgttcatatcagtagaaggtcgggtgagattctgatcatcgatttcaactcactcctttccgcaaaggtgcctgatggagctctatatagcagtagggcaacttgtcagctcgactcttgaacactttgcggatgatctacccactcagacgatccagtcttggcttcgacttctttggcaagcatggccacgacgtcctctccgctcatgccggtcgtatccttgacctgctcgacttgctggactaccgccttgacctcttcttccgcgggaggacccttgatcgcagcgatcttttcggcaatggccttggcagctgcgagacgttgctgaatctgtgccgcccgatcctcggcgggattcatcgcagggggaacaaaggctggcgcggaaggtgctattgacgcagctggcggtgtgaaagagggcgatacaaagctgtctttcgatgagacgaaattgggtgccgatgctgttggtctgacgaaagctggaggtccacccgctcccagccctgctccgtaagtcatcccgctgccagaccctagtcctgcactacctcctcctgccgacatggccacccgcctcgcatacgcctcgtcggcagtctcattccgactgggtccagaacccgagccaagtccggctccgatgccaccaccggtggtcatctggaactgcggcgccgattgaggctgagagagggccaatcgcctagcatacgcttcgtccgccgtttcgttcttgctgtactgcatggcttgacgtcgggcttgagcagcctcatccggttccgcagccggttcggtgtagttgggtgcaggtacttcttgaggctgattgttgtaaaacgacgtcggaggcgcaaacgtccggggagctaaggcgtggttaccccatatcagcggcaagatttccttctctgaccgaccattgtaggtcgacgtaccgtcctttctctgctgttcctcctgttcatcctccgagtaataactgccctcgctatcacttcccccttgtttcctctcttcctcttctttccgcctgacccgggcttcttcccgcttggcctttctatactcgcgataaagctgaagatcgttcggttcggccgggttatactggtcgtgtggctgaaagacgtgaactggcatctcgaattgtttctacccgggtacgatgcgagaaagaacatttcagccggtcgagctagggtaagtcgctcagtgggaacgggacgagcgctgaccttcttgttcctcttccatcgtttcttcccacggccttcgggttcaccgcccggatgacctcttttgtttcctgtcccgcccaggacgaccccgtcgagggtcatactaggcggcttgaagatcttcttcccatccatcgtcgaccccggctctgcggtcccggagcttgtggtcgcattaccaggggtgacgacaggcggggaagaaaaggtcgaagacgtgctcggtgcgctgatggtgacggggacgggtttgaacgcgctgggaatgaccgaactcgtcgaggttgtcgaggtggagggtttggagttgacctgtttaggtttcctcgatgcggcaggtgcgaacctgagagcggcggaccatcccgtcttgttcaccggggctagagccggtaccgttgaggatgaagcggaagccgaagcgctggcaacatctcctggtatcgaggtcgtcgcggtcgatccgacaggtggtacgcctaagaaggggaggaacggggagagtcggacgccctcacgagtgcgtcagcgaaaacgggctctccacgggtcatcgaagtcgagaggagaaagaccagtctcggatgggggtcacgaacggactcgttgatcgactttatttcttacgatccgagccgtcgtcccatccgagcctggttctccccctctctcttgtcgtgaatcgggatcataccagtatcaccagaacctgctccggtcggggtcgtagacgggcttcctagaggatttggttgtgctgcgggcttgttcggatctgctacaaagctcgtcccggcgaaaagggacatggcggtgggacgttgtagggcggtgaggtcgtcgcaaggaatcgagggtggtcaagtgaaggttgttggtggtgccaagacagtgaaagttggtatgcaaccgggatcaagatcgacatgcaatgcgattcgtctagttgcctgggactattttgatgaaccctgactggttgctggttgccaagatggtgttcgaggtcgagatgagcagcaggcagcaggtcaggatgagtacagatacgtacgttgagaggatgataccctacctgctcctgtaagttgtttttcatgtccgcgcgtcttttatgatgtccgtgcctccgctacaactcggctcatcctcgggccaggagccaaccaacctcatcagtcaattcaagggactttctgaattcgttgaaaggttccacacctgacatggtatcgtgggatattgcagcaaataacaggcggatgcgagggcacacgagattcacgaaagtgtcagccgagacagcgtcgatcgatattgacctcaagacgagcacttgtagagggctagtgggatggctgtgtaactcattccgactacagtcacgacataggatgtttcctcttctttgtctcaatatcagatgctggtactatactcttgctcatgagcagatgagcagcacaagatcgattgtaggtcgagccgtgtccgttcaattcgaccttctttcgaatgcgtttcacgtgagcgagctttgacgacgacgatcaccgaacgcgggaacgtctcgtctgcgaacgagatgcatcatgggaacgtaccgatcgataattgtctccaaagtcacaatccaacccatcatgatggtccgaatttgacaggtgagactgtatcagagaactttcggatcgatatgacaggatctcccgacatcaagatggcatcagctggcagctcgaccggggccgaggaagacggttccaaagacaccgactgtgagctcctagacgatcacatccctccccctcccctgagcgagcaactgactcgaatcaatctggctgctcgttcgatagtctactttcagtactactcgagcttgcaatcccaggccaacatgctcggggataccgcccggaccgaggcttatcgtcgagcgatcttgggcaacgcaaaagtcgctttccagggaaaacatgtgatggatctcggtgccggttcgtcggccttgcatttcctatcgaatccgtctcgctgaacatcgattggctggggtctcgttaccatcgttaggatcggggattttgagttatatggccgctcaggtgagagttgggcgacattcctttaacatcgtcgtccgtgtgagctgatcatcaagaacgcgggtttctgcaggcaggagccgaacaggtcatcgcggtcgaagccagctcgatggcggaaaagatgtctcaggtgaggacccgcgacgccgttcgccttgttcgaaaactgactactctacatcggcaatcaatccacgcacttagctcatcacactctccgaggagaacgacctgaacccgcatctccgggccatccgcgtcgtccggggcaagatcgagaccccctcgacccaagagcagatctcgacgcatttggaaggagaggaggatggtcgagtcgatacgatcgtctctgagcctatcggggtgttgctgtttcacgaaaggatggcaagtctgcgagggtttctatgaattccgttggcactttgacttatgatagggttgactcctggcggctcgtcagagcaggtagaatcgttcttgatggcccgggacctgtacctcaagccgaacggcgcgctctacccgtcgagcggcaagctctggttcgtccccatggaagacaaggcgctgtggaccgagaccgagagcaaggtcagtgcgcccgatccgcaatgccagttcagggcgctgtcactgacgtcgtacatcgacatgcactcgcaggcggccttcttcaaccaacgtctgtttggaacggatttcagtccactcctagacgccgctcgtgacgaagtcttctgtaggtcgtcagtcgcgtacaatcgatcagagtaagctgagtcgaccctgttgatatgccagcacaaccggttgtaggacccatcccacccaataccctctttggcgaagccgaatgtcccaggaactttgacttttacacgctcacgcaaaaggagctggaaaagtttgaaatcgaagtggagtggaccgtcaccaaggtcggactgatacacggggtgattcgcgcatgcgtgggctgttttccgccaaccgagatcgatgctgagtgatgacccatctggtttcctgttcgaacaagattgcatcttggttcgatctcgctttcctgcctccacgaggcaccgagccgaatgaggaccccgagaacgaggccatgaaagccgcctggagtgcggttcccactcctgcagagatggctcaacaagcggccgttttcaattactatggtactggagaaaacgtcctggatccggtagacttgccagaggcgcccgaagacgggtgggaggtggaactagacacgggtccatttggtgagctggacgtcgagctcaattcggatgcttgacacggctcattcgcatctctatttctaccttagcgcaacgaactcactggcagcagtgtcgactattggtctctgagccgcttgccgtcaaccgcggttcccgagtccatgcgaccatcacattcacagctcacgagagcaggtcttactatatcgacctcgacatgtgggtcgtccccgacgatggcagagaacaggtcgacgagcgaacccggcgacggatgcgttggaatctcgcacaacagacgctcaattatagctatgcagaggaaacggccgcaacggccggaacatggaagtcggttacctcggcgtactcgtgatagactgtattgcaagtgatgaaacgtggcatgttcgacaaggttcgaatcatttcgatctcaaacacatgttgcatgggtgtttcccgatcttgggatgtgtccagaccgacccctatcggaggcggatcacgagggacgaattttggagatcattttacacgccgtgaaccgtggcttgccgcgagggaggggcgagaaggcgggcaagcttcaggcagacttcctttcatagtggaagcgatcatcttgtgcaatgcacgggccgagtaaaagtgcttcactcctgcaccagcctctgctgtctctcaactagcccaaaccacccgccgtgaggcgacccacacggcgtcacctttagcctttcgaatcgagcggttcggcttattacggggacatgaatggtcgtcattgggagtcagcgctaatcgcttcgttaaagggggatacaaatatgcgaaacccgcaaaatagtggtggaaaaaactacatctatagattcattcagtcttcatcaagtttcgctacataggaaagacgtctggtctctgtgacaccacctgaagcgcctcaggccagaccttcactcaaatccgattcgtcgctagcgaaccccgaaaccctcgatcgggtcctgtgccgacgaggcgtatccagcacacctgcgggttcgtgcacgggtcccgatgcaggtccataatccgtatgccgtcttcgtttcggcgtgcgctccggggtaagcggcaagagcgtcgtccccgagctgaagaacgggtcgttctcctcgtttcgcgtgcgtttcaaagcccgagatgacgatcggacgagcgcggtaggggccttttccggtgtcatcggcgtgatcggaccgacagggctggtagcgggtttcctcttgggtgtcgacgggacgatgacggtgatcatgtcggaacaattggtcatgtgaaatccgggacccagggggttcctctgtttgtttttcctcggcgtcgatggcacacctgtaaggcggctagtgcatcagtaacccaagcttcaggtcagacggcggcacacgactcactgatcgccttggcttgttccttctcgccttgcccgacctttgcggcctgtctccatcctgcctggcaaccgtccaacgtttcctggacttgccaatccccgggtctgatccccctccataccctctctaccccgtctgcaaacgcatcgcactcggcctctatccaaacgtctaccagaccttcccattccttgtccggccgggtcttgttgacgaatatgacgggcaacttgtccagcggtttcttcaccttggccgctgctgccggtgtgagcggtctggaccccgacttgttgttcgacatggccgagagcacgaccctggccttttcgctcgccacggcctgttcatcccttatcgtctttatgaaatccttgacgagtcttttgatgccgacgactttgagcgaggtccccatgatgatcagacagtcgggtttcttggcgatatccttgtcttgggcgaggatgatgtcttccccctgtggatgaggttggtcgtataggacgagcgaggggaggagcatgcccgtcttgatggcacgagcgtttcgaaattccctctcgatggctaagccacaagccacctcgtcggtcagcttcgacattgtctgcgttgcgtacaaccgtgcggtgcggtgccgcgggggggggggggactgacctcgaatcccacaagcttcacattcgacacccatacctcgcaaccactcgtccacccattccttcctcgtcgcatattcctcggaacacaagttgcaccgggcgtaatgtacgtttccgtgcaattccatggtcaccggttgacgaggttttgctatggatttccttcgagcggaggacgacgacgacgacgacgatggcgatgcctgtcccgccacgatcgatgcgtacgacgccggtctcgacgtcatccccaatgccacacctcccaagtcccccgacttgcccttacagaacgcctcatcccctacccacgggaggggtagttggacgtcagactccgaggcgttcaagtggtgaaacaaccatgtcggctgaagactcaccgatccctcttctcttcatactccttgatgacatcttcggtatcgctagtgacccctctcccggtgtttcgtaccgtgagtacgctcggtccagccctggatcccgacggctgaggcggcgtcgtttgcgatcgagggaatgagggagggaggtgggggtagggcttgtgaacaggctgcatggcgaataaaattcactatggttcgtctggtttcacaaggttcgtaacgacgatccgatcttgagcaggtctagtgtatgacgtttttcggcaatgttttcgagtccaacacacgcgatcccgatgtcgattggcgatgctgtgggcgggtgttatccgatcgtgcgaagatgtctgttgtacaaatttaatcactagctaggacaatgtgtggttgtgatgatcgtttgggtcaatcgaagcaggtatttgggaatgacgacgtgagtgacagagtagtattggccaattgaccgaactggactctttgcctcctggatgatgatgatgatgatgaaagggctgattaccgcggctacagatcgcgagagagagagaaacaaggggcaatcccggccaccaatccgcggtgcaaaccacgaaagcacactcgcacctgatcaaatatcaatccatgatcacatcaacgatcaacgacgaacggccaaacagaataatagatgatatcaatcagattagattatatcaacaaaacatatttcccaatcctcatcatcaaatcggcaaacgaccgtcgtcctaatcccgtatccatgcacttccactgctcgaggatgatctcgcgcgacacgcgcagatcctcgcaatagtcgtcctcaaaggcgtccatcaagctcaacaccttttcacggactgggggtagacaaaacgttccgcagatgaggagaggccagaccagcatgaccacctgacgtagagcggtcgcttcgctgcagagttcgaggacgtagtcgatcgagctcatgatcctgggcgtgtcgacgggtcgatctaggatctgcagaggataggtatagggggcgagcgtgggcgacgatatatcagaactctcgagcttgacctcgtcattcgtctcgtattcaactcacctctgcaagaatgtacacattcgacatgtacttgtagatataatccccgcactgaaaagatgcccaatgagcccgtcgatctatctacccgtcctctatcggggcgagccgacttacggtcaccctgacgtgctgactcaacgtgctcaacccgttatgccacacatccagctcgagcaacaacccctcggcttgcctccgcatgaattcctccactttttgcatccccgccgctggatgggtgaaatcgatccccagtcgccttttttgggcgttcagagtcaccacctgcacacacagagtgggggagaggaggggggtcaactgaaggaacgtagccgagaaataggtccctacctgcgccttcaaatcacactcacccgggcaataaagtcgaccatcccgcgggaaatgccaaacgtccgttcgactgattcccattcccacgagcgagaagacgtttcgatgcaagaataccaccaggggtcgaaccggtccataagcacgggttctttctgcgtgatgaaacagcctgtgaagtagagtagaggaccatcaactcgaaggtttccaccaccggaggatctcgtcctgatgcgggacttactgaagatgtcgtgcgtcgtgagattctcgagcaagaacctcctggtgaaattcgtcgggtcactgctcaataccgcctggggaccgcctcgtttcgagacgagacggatcgcgtattcgaaattctccgaccagtccgaagccgagatgacgtcgcgcatcatcaggatcacgcacgttgccaataccgtgtcgactacgggtgagcgggcgataccgtgaaaggtgacgagatcatgttcatgttagctgcaggccttgcggcgaagagacctggatctgagacttgcattgatcagtctcgtcttcttctaccaggacgatattagccaaagcggccgttttgaaccgccttcccacttcatgcaacctgtcccgaacgtgcaggtacgaggctccttccagtccgtgacccttgcgtttctccctcgccgtcaactcgttttcgagatgggcgatacttgtgctcaacatactcatacgtagagccgcagctgctgcggacgaggtatccaaaagtcgctgaggcgtacacaaggtgagaatcgggttcttgtgcgggccgttgtttcccatggtgaccaagatacgagaggcgtgattggcaaagtgatggaaaagttggagggcgagcggggaagggaatgccgattgtagcgcttgcgcagtaggtatttgaggtatgggcgtgttcacggataccgggccgagttcgatcaacggcggatcgtgatctagcgcactatatcggaatggcaccagtcagccacaacattctaccgggaggatcgcacgcagacactcacttgatcaacgagtccaaagagatgccgtgcaaaagactatcctcgtccatatgatgatgatgatgaccatgatgatacccttgcccatcctgtgtggccccagctccatccgtcgccggatgtttccccttggtcattctcctgtttgccaacaccgagttcgacaggctcggcagtggatcggtcggtaaggaagaagttgtacgcgagacgctctgagccagagggttgacgagtggtaatactgttccggcgaggtgatccatggctcgggaagggattccggaagcggtgtacatggcgtcggtttgaggtatcagagacgagacctagcaaacaaagacagtggtcattttaacaagtggtcacacgatcagaggcgagggccagacatttggacgtactggaaagaggtcggtttcgatactgaaggatactgagcgatctctatccgtattcgccaaagccgaaatctctctccagtctctgtcgatggcttccctcgaccgcaatgtcgggacgggcgtgccagagggggtcgacgccgacgactttttcctgctcttccttggatgggccagttgttctgggtcgggccactgacacggccgctggttcatcttgcacctcaaacaggtcggggtcgtctcgtcacatttcaccttggcagatctgcaggtaaagcaacctcgagtgcttcgcgtgtaacgagtgcgttgacgtttcgagtcggtgtcgggcttttgatccttggtgtcatcactgaaggacgaacgttgagagtcgacctgatgtagacgggtccgggagggcgagcggtctctcgatgcggacgacgaggacgcttcgggccggctgagagggccaggaaagttcatgctagttaagcccggaaagtggctgctggacagcataccagatatcatgaatccgggatatttgtcgtatatactacgtcaagtgcggagcgaaatcacttgatctgaacctattgttggacgagtagaacgtcgttcgtcacgaatcacccgctatctacctcctggtctctatctttcgcttgggcgattatctcccgtccccgaggtcgtggttgcggggaaatggacgtcaaaacgcataaacacactgagatttgcgttttcgataaaggctatccgtgggtggggtgggggtggtaaaatgatacatgaggagtctacgtcgctgtcgttttgacaagcgacaagagattgagagattcgctctggatgacatgaccgaatcctttgcctcggactggctcctttcaagataacaagctcttatgaagccagactccaattgttctccttgatagtctttgaagcttccaggatgtacttgcctgcctttaacatggtcgacataacacgacccatgatcagacgtatacttgtaagaacggtcgtgacctaggctcgccttctttgtacatttgatcccgatcttgagctttcaggtaggtccagcccagtgaagcatcacacgaggtgcaaaataggtcggctacggtgtgcaaccccgttctttcaaaccctcggcgtagatgtattagcacagcccatatcggcatccatcaagatagctcggtgctcacagcagccgacgttcctcgggcttgcccattttggtgttgaccgtggaatgcatcaaactgacgacagccgatcgggcatcagctcaggacgcaagcgattcgtgcctcagaaaaggcatactatgctcgaccgtcccgccccgagaacgctttggataccagttcatcttgcaaggcctgagacgccaagtttgcaccaagatgaagagtaagctcagcaagactggttatcgatgcgcctcaaaaattggacggcttacgatgggtaccaaacaacctcgacaactgtaaaccgccttgtctttgggaaagtaatgcaccttgaccccctccttggctttccggtctgctgcatccaatttcgacctttccgcctctgacaattctctcggtatacttgaaagttggggatgagaaatcggaagcgctagagcgacaggagcggttgattccgaagcggattcttgcggtgattgagagagttcagactctcgccggagggagaggaaacccggtggcctcatcctggagcaagcatcgagtgcggttccagcgagatcgagagactatcgaaactttcgagtttcacagaaagctcctgcgaaaatctactttacttgacgagactcatcagctatctagaggtggggagacgagccataggatcaagggcatattgacaagttgacccatgtcgaccgggtttccctctgtgatgacgaatcacgtgtaagtgaccgggaaatgcttccgcgttccataccggcctcctacttgaccacgtaaggactgaccagttaatatctgtctgtctgatcatggggaccgaatgtctgcgaggagggtgtgaacgcagtcgatgacctccgagatctcgctattggaaaatcgaaacagaacaggttggtccatgtctgctgcgggagaatagaccgagtatcctcttgatactgatcagcagagacgggctcactcgcagtccaccctgtcatcataggcactcctggtgcaatcgctgtgactgccaaccaatcggcgcgggtccctagaagagtgcacgaaagtccccccagtcaggctatcacaacctcgctgaatctctgtgatgcacatataagatgaggtctaatgatgaggtccaatgaggaagtggttttcgccggtctcttcaccctggcgctagttcctggcagtcgtcgtgatgccgcgatcaagaaaaactctgtgaggatcacctggacaagcgagagaaagagagagagattgaacctcggaaacactgaccagcaaagctaacagtagtccacgtggagataacgtaatggctctaccttccttgtcaaatcccggctcgtcctgtgaaacaagtatacatctccgtcgtgagatcgacattctcccctctttcggtgggttacgcttgtgctggttcctgtggtccaaaggattgaagatgagatgatcgtatatcatgagctgccaggaaggcatttacaggcgttatgcgccagcatctagtttgattgcgggtcgtgcgactcggtggatgtcccgcctgccgaggcttatcaaaatcttcaacgtgattcatgtaattactacttagaattgttcccaaatacatctttgcgtttgaccactgtagacagaaccaaaactctttacaactattcccgatgatcagatgacgtatcggaagtggactgatgatggagaaagaccgttataagcggaagttacagttgttcagcgaaatgcgagactcaccgctttcccaatcggtcaagtctccgaaggcagaatcgttgagcttgctctcgtcgaaaccttgagccctgaggatctccttgagctcgatcttgtatgcggcggcctcgtctcgagacatgagcgagatatcttttaggtccgtaggcagaccgagcgcggctctttgcttctccttcttcttgttcaggtaggtaaggtaggcggcttgtgtcaaaatcaggatgaagagcatggcccaacaagcgatatcgaccttgagaccggtaaagtagtacgggttctcacgggccaaatagacctggggtccgatgatctgtggtgaagatcagaaaagattaaaaactgggctgagaaagaagccagacctggactgcaactcacgttaccaacgcattggaagacgaacatgatggcggtggttacgactcgcttggtggaaccggcagcgttcaagttggcccaggtataaagcagcgctaataccaaaaaggtcacacgtcagacgcgcttcgcaactcggtttagcacgaagcaaacttacgttgcaaagctcccaaaagcatagcgacgtagtaacatccgagcaagtcgttgggttgatcacgagggaccttcaaaagaccagtggccccggcgataggaggcagacagaggaagctggatgtgccaggtcatcgtcaaactctgactcgaatcatcttgtaaggtcgattaaactcacgcaagtacgggccatcgcattttgaatctgttggtgatccaaattccaagcaacaatgtaacgatctggagcgctccagtggggatttgcatcaagatagctgcgagaggtacatgcttcagggtgagcaagaattctgcggatatcggtttggcggtcttaaaggcttacctttgaaagaagtaaagccgagacctttggtgatgatacctccgaaagctccgaatccaccggaaggagtggcacagcaaacgtacatgccggcccagagccaagctgggacaatcaagcgcgttagctagctgaaccgaactgtggcggatctgacctgctcactcttggggtcgataaaggtctccttgacctggtaccactgccatttggaagacttggtaccggtattgttttctcgtagcctctcgatggcgatccttttcaagacgagggatatgtcaggtagagtacgtgtagcgccaaaaaagctaaggatctcgactgacaatctgtcgttacccttgtgcaagaacttggcggtagtgggcgagttgggcatgagccaccatacgaccgaggtcatcccgagggaaagtagtccgagacagaggaaaatgctctggtagggtttcagaccgctcttagcgtgaccgacactgtgcgtaagaggcccaatgagcaacggatactcaaccacttgtcgtgtccaagctgactcacgcatatgagaggaggggtccaaggatggcagccatcgagttggcgacctgccaagcgatggtcctatacgactgttctcggcgagtccaccacatctgggtaaccaagatgaaagaaggcagaatcgtactatcacatttcgacgattgtctgtcagaaccaggcttccttgaaggaactcccaggcgcgatgcgatgctcacgcttcaaagacaccaagcaagatacgacagatgatcaacccggtaaagttggtcgcggccgatgtggctgcggtacagatactccaagccgtaaagttgaacatgacccagtatttgactgtaggagaacgctccgtcgacttcagtgccagctgagcgtccgttgcgaccgaggtcgactcaccaggaaagacgatcaaggcgtaactactcaacggctgaaagaccaattgggcgacgtagacggacgaagacagccaagggtattgactgcctgtcaatccggtcgattctcggagatcaaacacggctgcataggagacactcgacttgtcgagctgttgtagccagtacaccaagcacatctgttgatcatcgcgaatcttcagtctgggtggctgagcgggaattcccgaaccattcgtatactcacgggcacacagacgtaaaggtcgaccatgcgcaggacccgcttattctcctcggccgtgtactcaatatggccaccatgagcggccaacaaagcggcagcgtcgtccaactgtgtgtttacgcccttcttcttgcccccgtctatgtgtttgtcatccagagcattctccgcatcgtcggcatggatgcccccttcgatgtgctcggtcgagagcttcttctcgtcatgatctgccgcgtgcgggtggcttttgtaaggcgaagtcatcctgagtttgaaccggagtcgttattgaccaggtctttgagagcggctgcggtcgcgcgtcgaggtgatggtgcgagttggaaccttaagcgtcgatgctcttaccccgcggagaaatctggggaccaggccgtatatattccttgggtcattgctcgttgattgacaccccgagacgtcgtcacaagtgtcacctccttctgtctccgtctaccccacggcaccccggcccgtcgttgtatcgagttctgcgtatctttacaccgaattgcgaggtcctcgagcctgtgaagtagcattttcctccatgacacagccagaaaatgggagcgtccggggggcgtttcaattacctctgcgatttccccgtgacctattcgggatgatcgaaaaagaagcgatttcgtagcatgtggttcggtgaaaagacgctcttggcatcgaccggcgagctgagaaaagagcggtggtgggagatgtatcgcaccgtctttcttgcgaaggtaatggcggtcaacccgggtcgtgtaccggtgcatacgaagagcgagggaaaccggggccacgacgaagcatagtgtcggggacttgtcggagccgtagttgttggagctagatgaccgcgatatcgaccgagggcgtgggtacgaggcgttgtcgctacgcgctatttttatcgatcccgagtcagcgaaaaaacggggggattgagcatgtggcatgtggatgaagcgctgatcacggggtagcgaaggggctaaagatggcaaatctccatagttggttcgttgcagcagggctcacctgacctcgcggacaaatgtcaaggtcattgttgcgagcagttccccgcttgaaacgtcaatcgcaagcgaagccatgcagaacgccgaagctgcagaatcacccgggcgctaaagcgagccccggcccgaggtgattcggttccgctaagaagccgatgaaaccgatatgcccgagctcttttacaccacacggatctcgaccgctcgacctcgtgcaggcaccaagaaacgcctcgcccaagattcacacacacagcacattcggactgactttccataccgcacctttttcggccgccgtgcgatcgatgtgcagatgggccggtccgagggcatatggacggtacaatcttgtaccggcaaaagtccattctctgacaactttggaccgaactagcggccgatgtacgtcacgtaattgctcaggggtcgctgtcatatgcacctgtccagacctagaagtagatcttgacgtcttctgcggaatacgacccatcctccttagctgtgtacctttacacttactcacgtatctattcactacaagccgcaatcaagcatgtcgtcattgacagtcgaaagagccgaacagctcatcaggagtctcaccgagggattggtcaacatcaaagatgagacgggagaattcctcatgacgagtaagccgggaggaatcgtgctctataaaggccctgtcggaccaagagttgacgtttctggctgcgcagttcctgatggaacggttatcgataccaagggattcggaggctgggagtggagtgagtcattgcgtcggacgatctttgctggccatatctaatgcgtttggtacctactcgaacttatacagctcacggaatcgctttgactggtctttatcatgtaagctgatggcttttatccatgacccctacttcctcaaactgaacaagcgtcgacaccgcgatacagcacgccgccttgactccttcttcgtccgcagcaagctactccctgcagaccgccctctcctggttccgcctgcagaacgatgtatggaagggaaaaggtgcccctaagaatatcaacaccatgtcccccttctacagcctggcgtgtatcgtctctgacgatcttgttgtagatgagaacgggcagcaaaagccggaggaaaagaaattgtggatcaactggctgaacgaatgggccgagtggatcatgaaggagcttcctagtgagcgagaggacccggtagccagagcgaatggcaactggactgatgattactgctcgaaaaggaaccgaggaaggcggatttcagcacattacatacctcgaagtcaacaaggatcagctctgggacgacacattaatgatgagtggtacgtcagcaaacgggcgcacataggaacgggttccgacggaaaaaactgacggaaccgcgatcatcttggtccagtcattcctcttgcaaaggttgggatcctgttcgaccgaccgcaatacattgaagaaggtgagtccgaagacgataaatagtacaagccaagcgagaattgaccgaagatacccctcggcgcatgctctccagccaaataccaattcatgctgcatatccagtatctcatggatactgttaccggtctctggtttcacggctgggagttcaccccgggcaaggtcacatcggggcacaactttgccaaagccctttgggcgcgtggaaactgttggattactatttcgatccccctcttcattgagctcctggctgaggatgccaaaaagcacgggcgcacgctagacgagcaggatcccctaaggaggttcttggtcagcacgttcaagaagcaggtagacgctctgttgaaggttcaggaaagggagacgggcatgtggaatacgctgttggtcgaccgcgagagctatatcgagtcgagcgctacggccggattcgctgcgggcatttacatgggtttaagactggtgagcttgccgctcgacggatccgtctagcgcccgtttctttgactcacatcgcctccatgacatgatccagggtttgatcgagggcgaacgttacctccagtgtgcagatgcggctttgcaaggtgtgatcaacaatattcgcccggatggacagctcgacaatgtctcgttcggtacgggcatgggacacgacgaggagcactaccgcaagatccccatcacgccaatgccatatggccctgcccttgcaagcttggccctgatcgagtgggaacgatggcagatcgagcacaataaggcctgagcccgatgcatgtcccttgaagttgtaacaatgcgaatcgcgatgaatatctcgaatgcagtgtgcagttgaatctttgtcgaattcatgcctttatgacgttgtctggaaatacaacttgtaacgtgcaatgaagtcatactttacagcatctgggccaactcgggaggacctcggaaatgggccttgccccaggtgagataccagactacggccaagcaggcaaagccgacgtaaacggccgcagcgtctgaaaagaggacacgttcgggtcaatgagggttgttggcagcgaggggctctggagcgttgacctacagttcatggtgtttgctaggacggggatcgtcgttgggaagcttaatagcgggatggcaaagatataccaagcgatcgtcactctgttctcgggaacgtcagtatcaggtaaatagcgtcggaacaggagaaacctttgtgggacatacacgttgcaaaacatcccgaatcgcttcccaaggtagaacttggctccggacaatcgttctctcccgcgcactacgctgatgatcacaggaatcacatacgaggttcccaaacaaatgacggcgactaaggcgcgggatctagatcaatacgagcccgtttgatgcgcccctgaacgaacctgtgctcacctgagatgaacgcgttaaaggccgcactcgacccgaaatagagacagctgagcaagacttgaatggcgacgcaaagcaggaaagcgttgacgggcatttgatgtcgcggagacactttggcgaggtatttcgatccaggaatggctccatcacgagcgaacctggagtggcggagtggcggggttatcaaatgagaatggagattgcgcctggtgaaacttcgtaactcacgcccaggtacacctcgacgaaacctgagaacaggccaaaccgcatgcgacaccgttgaggaggacgatgaaaaagaggccgaaagcggcagcggtgccgcccgttgcttgcaggtagagggctggcagaggttgtccggtggaacctatgtcgacattaccgaaactcgtcaggtcattccgcaacgccgatgaggctacatcactcgactgactgaggagcgccgctccgatatccgccgcggtgaacaagatgggaaggagaaagacgatcccgaatatcgagctacccaccacgagaggtcgaggatcagcgccaccgcacatctaccttgacatttcccttccgccaccccgcgacttacttgatggccactccaccgaccatggcgatagggacgctcgtctcgggcgtcttcatctcgtcggccatgctcgccaacatgccgatcggagagaaacagtaggcgccttggatcaaggccatgacgaaactctgggatgggcgcgaagtcgggcgtgacgagatcagaacgaggcgacgatggtaggacccgccgagagacgcctagaacttacccaacctcgaggccaaccggctccttgatcctgccagatcctgatcgagcgaacccgtgaaacgaaatggatgagcttcagtctcgctcggaaccccctggaagtgccaatgctgctgccccatagacactcacgtaaatacctcggcggcgctcctcgtccccatggccgccttgacgggcaaggtgaccgccgtggcgatgacccccgcggtgatccagatgatcatgaacccgtctaccttgggcagggccttttgaccgaggatggcgatggtacccacgacgatgatgagcgcccaacagctcagtacggtgtgccaaggtttgggaagatagtctgggtagtacaggttgaccgaggcgaggatgagctgggtggttctgcatgcggggtgaggagcgttagcaccgacgatcgtcccgtctgcacattctaggtctgcatgtggctcacccaaagtttgcggtcagggtgacgatgatattccctacgtcgagtcgaacatggcacggatgagttgaagcgctctcctcctcagaccgttcattcccggtaaccccgtatcgtcgactcaccgcacaaggataaccagccgacgacataactcgtcaacgcagcgtatttcggggtagacatcatgaagctccagtaatacactgcaccgaatcggaaacgggtaggggaacatcgtatcattaaggtaccaggagaggagtatcagccgtccgatctcgcatcgtcccccccgccccatccgcgggtacatagacccggcgctgccgacatcgacatccgactcacctcctcccgaagtcgggtaccgactcgcaatctctcccaagctcgcagcgatacacaagctgatggctgacatgatgaaccagcaccagatgaccgtgacgggacctccttgctacatggcgtgatcgcgatagcgcgcgccagcacacgggcggatgagcggggtgatgatgggagatgaaacgaagaagagggattctcgatccaggtcagcaaaaagaggtgtcatagaatggccgcgattcgattcgattcgactcgactcgactcgacccgccgtaaaggggacaagaagaggaggagaagagggtactcacgatgagtgaatagaagaacgtcgtccctaccccgtatggcacgctcatgatgatgaccgagatgagtaggagattgagcgtcgatttggtctgtcatgcgttgtgttgcgttgcgtcgagttgcatgccgtgtcgcgggttgggttgggtgagaggtggtgttgtaaaggaaatccggttcgatgtcggtcggatttatccgagagcgtccaggtcgtcaagaggaggaaagggtcgtattcggggtatagacgtggtttggaatgaaaaaggggtcacacgagggagattccaaagacgcagggaggtggacatcgatcatgttacggtcaaaaccacccatgagcccctggctttgaggctatccgacttcgactcaccctcggcatgacggtctccacgccataagcctctcccggggaataccctccacctgcctcttcatactccatcggtcgtttccctcgtccgtccatgtcgtcccccatatcaaattcggatccattcccatgatgagcgtcgtggtggtaagcctcgacggtcccgaaatcaggagcggtcgtcgtcgtccggtcgaccgaggggtcttgtttcttgctcgtcgatggcatcgcgagatctaattcggatttgtttgagaggatgatggttgctttttcaattccgagttatatggagatgaccggcaagagacaggggtccgagatgagcggctgtccaaaggtcgagtcgttgttcttgctcgggactatgaatccgatatggccgactttgagtgagggtgtgtacaaacagacttggattgatgagaccgtggtttgacatttcttctacctgtgtgtgtgctctgttatctatatgaaggagccgctggggggtgagagggggggggagttacatgatctttcgggattgtctatcacatctcctccatagcagcggctgtggataaacttggaatcggcttgacccgatcaaacgagtgagtgggtcgaggtttacccgagagaaacatgaatacctcctcctcctcctcctccccccccgcgcctcctcctgcgcctacgcctcgctcccttccccctctcggactacacggaatcgatgatggtaaccgagatggatgacccaagatgatgaatatccaccccggccttaccatctactgcctactgactgctctgctaccacacccggcgatcgcaggctacaggcgagagagctattggcgaaacgggcggcacgaaaccgcagctttcatcaggggcacggtgggtgggtatgtcggcttatcagcttgtggcacatcacgttgaatctcgtcgattcgtctggatgagaatacgggcacgatagggccactcgtcacccgccggccactcgatgacatacgacgggtctatcgccgtcctcgtcatcggaccgttttcgcaggacgaccgtcctctggtctcgaaccgatgcttgcaacccgggagacctttcgtcctgaccttggaccctgtgttacttggacatgccggccggctccttcgcccaccaacacgcaatgtgagccgatatgggcgaaaagaatcagatagaactttggtccactctcaaaatgaacctatcaaatcgatcgacatgtatagtatagacccgagaagcgaaacatccacgcacataaacacacacacacacacacacacacacacacgcacacgcacatgcaaaccctcttgtgataccccgctgttgaaccggcgggatcgggggtgactctctcatctatatctaggcctttccggcgttgtaatcgtacttttcgtaaaacgtcttggcgtccctcgtctatcgaccatgtgagaaggataaatggacatcagcgccccgtcccgaggatcacgaccgcgaccacgaccacgaccccgactcacatctcctccactcttggcacccctttccctgcccctctccttgtcccggacctttctgacctccctgtcctcgcgtaaccacctcaacgcgattcccaacaactcgccacgcttctcctcggcggcgacggaatcctccatgatcgtcgacgagggcgagtaggtgaccatctcgtccggggtcctacctagacggaggtgacagatgtgggtggggaacgtctcgatgtgatcgtaaatgtgcgtggcgtagacgatggtcgccccgcgttctttactctctttgaccaaaaaggccaacaactcggcccggacgagcgcgtccagatcgacggtgacttcgtccaaaaggaggacgtcccagttgcccatcagacccatgcagagttggacacgacgacgttctccatcagagatctggtgcatgcgcctggaggtcgtagcgtcagccgccacccttgcgacgaacgaccggactcggggactcaccattccagatccacatccaacaggtccaacaagacgtccctcctctccttgtgcctgtacccaccgaccgagtccaggaaatgggccaccccgatatcgctcctgatcacggggttattcgcccactcggtcccgaggtagacgaccccgccgggggggttcataaagacgtcttggcccatgatcctcgccgtcttggtcttggtcagtttctttcccgcgaggatacggaggagggtggatttcccggctaaaggtgcgtgagggtcaggaggttggggagggataggtatgagttgagttgagatgagggacccttgtcgtcgtgatcgtcgactcacacccgttggcaccgatgagcaaacatctcgctccttgaggaagatggagatcgacgtcctcgagcgtctgttcaccggtgacgccttccgagttgttgccctggtaagagaaacacagcttcttgacctcgatcgcggggtcttcaggagagatggccatgatgatgtgtcgtcgtcgtcgttggtttggctctgcttttgacggtttagggtcaaggcgatctgattcgagtacgcgcggggcgtgtcaagtcagtcgtcgtcgattcatgtacgtcaagacgagtcggtgcggatgaagcttacgggggtgaagatgatgactgaatgtctgaagagagttaatagaggtaacgtcgtagttgatgagtgttgggtgtcgagttttatgaaccaggggggtccatgcattcgatcgagcttttccactttccgatcccatgcatgccatcgacgtctctggtccatttcccgggcaacgtcgatcactctcacacccacctctgatctgatcactgatccgctgtctcttgcgcctcttttcggaagtaaataccccatcaatgccgtaaatcttcacttttgccccctcgtcatcactcgctagatcaatagatttgcatccgccgcatcaaccgaaccctccctccatcaattccatcaaacccccccgcgatcacaagttgcaagttaccgatcaagcgacattcaacctcgaccacacttttgacatcgcaacaacatcttctgcccacctcgagcaatatatatatacacccacacaaaaacatgtccaacatacttagacggctcggtaaactactcccgttcggtaggaacaaaccggtcgggtacgacctcgacggtgagtcctccacctctcggcagaagagttgtcccttcagctgctgagcgtatgcctgataacctcaattgatcgacgcgatacaggtaatcgattcttcgaatggcctaaccctgctggtaagtaccccgccccgtccccgcatatccgttgcgatccaatgcggagaggttataggtcctgagacaatcccgttccgatcccttgcttacgccatcggcgacgaccactaataggaggtcgaccgaggcggtccgtagagtacaagatcaagcgtgatatcccagactacctcgtacaggaacgtcttcccagtcagtacaatctggtgccgctcctcacgggtcgaacccgggtgacccggagctcacacgatcttgcatctctttcgtctatgtttgctcggcgtgtctcgtcgtcgtcatcgtcgtcgtcgatattacagtccaatggatgtcatgtacgtccaacatcgacctcaatctgcccccaaatcatgatctagattcaagatcggaacgagctgatctcgatctcgccttgtcgtcatgcagggctatcccatacccgacccgatccaccgtccaccgaggtacgtccgggtactatcatcctcgcctctcgtcttatcattctctcctacgtctgacctatgaactcttcttcgctcggcaggaattacaaaaagaccaacaacgtcgactccgccttgcttacaatgtcgcccagatcgaagcccgcgatgccgaagagtcgatgaagaggagactgttgaacgcgcctacagagtcggccgagatggatccttctgctcgcgggggacgaacgatgacgagtggtacgacccagcctgtagggggacccgagtcttgggctaggggagacccgagagagacgtatggctcggaaggcgaggcgacgggttccacccggaagaggtccgacgatccgctcgcttacaccccaccgtcgacatcctcgacgtcccgttccggacctcgtcattcgaccccgcgggacgcgcacgatcccaacgctccggtggacgaggacctccgggctcgatcgagacgagagaccgaactcgcacgtcgtcggatggaagtctcgaaatcccccctgtccgggtacgtcccgctcgacccgggtcgatctgaacgtgcgggaagggtcgggagcgattccgtaaagggagacgaggagaggggggatccggacgcgaggcaagatccaggatcggtcgtcctccctcgacctcgaaggcgtggggggtcggctacggccagcaacaacgaaccggtcgatctggacgcactggccgccaagggacgggtggatgcgacgggcaagaacgaggttcaggacgtccaggccgggtccgagaaggagattcgggaaaaggccgaggagctcgagcgccggtgaggcggcgaggagaggagccactccccatgacttttcggcagtccggaaatgctactgtatggcccattcgttgacgactttgtcacttgccaaaggctcgaaccgctgttcccatgtggtacaacttatgaaacaccatctattcaatccgactctccacctttttcgcgcccaaccctctctgcttggtccctctctcttcggggtgcatcctggccgctcgtgtacctgcggcgtgtcgaaacgattcacgtcaggctagcccccgctgacccgctccgggccattcacctcccactcaccaaactgcatggccctcttcttaaactcggacacttcgcccatccccgctcgtcgtgccgcgcatcgcaagacgctcttgtcccccttgccttcacgagctctcaagtcacacttgatccagatgggcagttcagccacccatcccatgaacgccatgtcgaggtaagggaaccgcgtctcgacgccatgcgaagcgatgatccgatcgtcacgaccgaggttgcgggtcggtatccggtcaatatccatctgcatctaggtagcgggcgcgacacgcgtcaacgctcgcttctttccccagcggtccgtcgattacagactcacttcgttgatggcgcctagccatcctctaaagttgtattctctgcgatgacgtgcatatccacctagcagcctgataccgcgacagatcagcgctcgtgatcgactccacaggtcgtcggcggtactcactcgtctgcgcccaaaccacttaggaggaccttggcggtacttgcatacgacccgtgaccttgaagctgtccttgccgacgtgcagcgaagtatagaggcatcgcaaggctctgcaaacatgcgacgagctatattagtgggagctgcaacgtaatatgccaatgagacttgccaaatccatctctttacacgtcacgacaaggtgtgagcggaaagtcagtttgcttcgagatcgtcggatagtctttcgaaactcaccagtgtccgacggatgcatgagctcgagtatacgtcctcgatgcgcttgtgattcctaaaagggctttgactcagtctgactgatgacgatcaagcccccgctttacgacatttccgcttacccgatagtcgatgttgacttcgacgaatcgccattcacggtctgggtgcaacgtgcgaagcatctcaacgctttccctcccggtcaggcgatctgggacgtcgtatatatcgcctgacctctccatcagagcctccatcgacaaggtctctgcggcgctctttcgttgcttggcgagttgtcgctgaagtagctcttccgcggcggcgatggaccgggggttctcaaaggccacgttgagcaggtctataggctctccgggcggaagttcgctgttcagagtgttcgcgatatcagccggtcgtgctttttccagcgacgctgcacacgcacagtgatgctagatgggacaggaaagtgcaatcgagtccaccggaaaagagaatagccaagcgactcgtgctatcatctcgatagtgaggatcagaagcacgtaaaagtgctgcgaaagttttccagagcctgactcacctcgacgatggagccgggggaatgttctcgacccgaagcctcacgctctcccgtagttgggccacgaactgatcaaccacctctggaggcggacgaggaacaggtcccacagagagatcagactcagtgaacgttctcagcatccgagggatcgttccctgcttgcacgagagttcattggtcagctcgaatcgcaggtcgttcgataggtttgattgtcttacgaaaggggatgtggtaggtcggtcgatgacgctcagcgcctttgagaagtcgagctatcatttgaaaaaagagacgcttggttggattttcaagcctgagctatcagacgaaggactcacattgcccgtagtttcctggacaatttcgtctaccctgagctgccagaacccctgacaatcgacctcctggaagacatccccagcttcaccctggccacttgtccggaagccgacactggcgatcgtcagacccgtcgaactagcggatggatttatcaggagtgaccgtcgtcctagcctgtctctcccgaacgtaatgatcctggcgtgttcctggtgtcgggcagaaaacccaaggtcagtggcagcccctgacgccgacaggtgagtgatgacttgcatcgtaatgcacaaaggcgaagctaacagagagggaacgttcattccggtatgagtcttatcggatcctactagactccgacttacggtccttcgacgttcccgaggacttgcacgatatcctgaccatgacaaatctgttcccagatcttctcggtatcattctcgtgcttccccacgtctagacctctgaagacttgaccattccagcaaaagatctgcgcatgacctcgcataggctgagataccacttcgtctcccctgagtgctaggacggacgaagtaaattctagttcgagtatcaaagatgagccgggaatggccgggttgatgctgagcgattgcagtgcatcgggtcctcgtctggctatttcgttacgggcagcagatggatcgtaagtcgatcggtcgtccttgatccttagattgaacagaatgccacacataggggtagacctttcgattcgtgcgactctttgttgtaccccaacaccttgtcgctatttggtcatgcgatcctaggtcaacatctacccaagtaactgtctcttactcagggttcgtaatttagcttccgtaagcctccggcgatcttccgtcatctgacataacgcatgctttatgcgttctcatgcacatcttccagggcgacgcgtaacaaaggactcgcacgctctctctctgtcttcctcccgacccgaggagtataaagaacaaacggttggaaaattacaggacaactcatctcgtcgcacccgctcttcttttcccttttcatgtcatggtccctccttatagagtcgcttgctcgccaagaattttgacccaacggcgattgtaggtgctcggagggatctataccaaagttcggggagcaacaaactcttgttcctcctctcgctctccctttataaactcgtcgacctctttcgaggggtaggcggctttggttcccccgctgggtttcggctcacgctcaacgaatcaaaggtcaaagatgaacgttacatatgtacgagctctgtgctccgggacttgtgtctggccttgtacctttcgcaatgcacccgatcgatatcacgcataacagcatgcccacgcgacctccgagcgagctttcgttaactagccccatggtctctgcttgccccgtcgtcttacgagcagctttcggtctgcacaaagcagcttcgcgcagtagcgaccatcctagctttctcatgacccggttgataccgtaaagcagacaagacacatgattgatccacaaacttggcgatatacggtacatctgtgttgacgcgcttcgtaaaaaatgaggtagaagacaacaagagaaacacgatggagtggaagttaatgccgagtggactaatggctggcctccagtcttggtggtagttccgagttactgcctatttctctgtccgtcgtctgtcccttgtcatttgctaggcacgagcagagcacccactgcatcgaaacgacacgctcaatcagatcgcatcgcatcaaacatcctggctaaatcacgccctttatagttctacgtcgacacctcgagttgaacgagagtcacatttacatcgttgctcgctactcttgcttcagcacgacgtcggcatcgtcgtcatcgacttctacttgtcctcggtgtaccctttggtagcgacgtcgtcggcgaaaggatcgctgcgacgacgggcctcgacatcgtcgttggacaagtgttgatgatgagcgtggttggtgaatgagccagggccatcgaatacctcggcgatctgctcaagagtcaggccctttgcttcaaccatgtctgtcatgagacaatgcacaggggttggatcattagcaacgctccgggacgggcatgccaagaggtgggaaactaacacttgtaggccaagacccattggatgaacactaaaggaatgtagacggcaatatacttgtaacctatcgcaggaccggtctcgatgagtaaaagcgtcgttgggtaacaagacagacgcggacgtaccgatcttgccgagagcgatcgaatctacccaggtggtgtaggcaccacacaattggttgatctggttccacaagaggagacccttgcttcgcatggtaaacgtctggacctcggaagtgtaagaccagagcaccgggtctataacaaggacgaggacgatgagcaactgctaggggtcgctcagcgttacgttcgcgcgacttgctggaaaagttgaagaatccgaggtacagccagaccatcaccacgctaaaaagaacgaaaccgccagaactgattagctgcggcttcgcgtgtcgagacgagcaggcactttgctcacactgcgatgcttgctgaccggttctcgctgtcgttctgggagaccccactgtaaataccaagggtgagctccgctcacgatgccggtcaccgaagtcgacccgagactcacagcgctgcacacaccccggcgagacacaacaggagcatgggccagatccccaagaggaaaggtcgcctgccatactttttgccgagaacaacagcggcaatctggcagaaccaagtgaacatgctcagaccggcgttgataccggtctgggtcgatgcacccgtgataccggcgagctcaaagatgacgacgtctgaaacgtgtcgagatgatcaggttgctgtaagagcactcgtgtggagaaacctgtactcacaatagtagtagaagatggaagctgcaaacgcgtattcgtggcactcagtatagctgtctgaaaggcgcacccggctctccactcacaacccgaaaggcaagtcataaagctcatcaacgcggccaaactcaagcggtgctgatttccgcgactggagagcaagctcttccagctggtacccttggcgatcttttcggtcctgatggcctctttgatctcttcgaattcgaagaggacgagctcgtcgtcggggttgccgttgccgtggtacttgacgaggaaatccttggcctcttgctcgcgaccgaccgacatcaggaaacgaggagtctctggcatgaattggacggcgacgaggatctacgagggcgacgttgtggtcagccatggtggtctttctccggcgggtcacggaaactcacatagagagccatagggacctgcatgaggtaaggaaccctccagctccacgaagtgctgaggtaactcgttccaaagacggtaaagttggcgatcacgtttccgaggatatagtacgagttccacgaatgggccatggtgactcggtttctaggatgggtgatctcttggacgacggcgagcgaggtcaagaggaacgaggccagtcctgatgatggttcgatgcgatggtcaggattgcgggtttgcggtacgaggatcgacgcgttgggagtactcaccgagaccgatgatggcccttccggctacgaacactgtaggagggaacgtatcaggacggtcgctccgagacgtttatcgggaagacgtcgctcactggcataaccgttcacgccgggaatcccagccagacaaccgatgaccgaaccgatcaacaaggtgtaagagtagactgcgttgcagaagcagcgagggggtcatgatgagcagcttgtccaggcggatgacgtttcgctgcgctctcgtggactcgacccgactcacatcgaacaccccactttcgaccatacttttcatcgatccagcagatgatcggtccgacgacgaacccagaaaagctaccgcaagcgttcaggagaccaatctgggtacggttcggatacccgagatcggcgttccagggttccatggcttgcaatccagagatgatggcgccgtcgtctagacggggggtcggacgaaaggtgggtgcggcgcgtcagggtcagggtcattgtccccccgcaaggccagtgcatggacgcccagactcacatccgttcaggaccatgccgacaaagatgatgctcaagaaaaagttgagatggaggttgcccttgttttgatgccatttgaggccgtcccacgcgttgggactggcgggcgacggcgatggcgacgatcggtcagtacgagtgcgagtacgtgggggccaacgacggatcaaacgcccgagcgacgaggaggatcacgttactcacatgaggtgccaatcgttcatgtctattccacccgatcgaggccaagatggagcgatcaagaacgtgaccggccgaggagggagaagaaacaaggggaaagcgaaacaaccaatcagtatcctcgaacagaggagacgacctctcctcccgatctctcctccacatagggtccgaaggggggagggcaatccgcctcgactctcgaccggctggaccggctcgaccgactcgaatcgaatcgaacctggtcagagtcggggccggaaccccagcccccgccggaaaagaacccccatgtgaactcgagatcgttcggtcgggccgatgaatcggagagagagggggaaagggcagaaacaggcttagcaaagctcgacgtcgcagccactacgctgttccgctcattaacggtatgatctcagcacgagacggagaagcgactcttcatctttctcctccctggtccccgtcacccgctcttccgctcctcgtctgtcttgggggtgacagacaaggagggagaaagagagacggagagggagggaggggggaaggatgaagagaagtctcgctcggcacccgtgttgctagctgttcggagaagaggtatggttcccccgcgccccaagacgaatcgacagtcgacagtcgaaaatcgaatgtcgaatccggcccgatacgtcccatccctatcgccatgctcaagcggtgatatttcagggaaggagaccgagaccggcagaccgcaaacccagtgccccgatcgaggcatcaccctcattctaccgtggctcgtgtcacgcgatctttcgtccgtccttccttgccgtggagacattcctgcactgcaaacaagggggggggggggggggttccccacatgatcttctcctttcgcctagtattacgccctagaaagagatggtacgatcgggacgagtcctagtcctagtcctaggccagcgcgggtgtgggtgcgtgcggggagtagactatttctatgcgatcgttgcgatttctttcatggtttcgggtggttcgggttccgggttcgggttcggggtttctttgccgatcggatgagatgagatgagatgtccgtcatgacggcggtccgtgtgtggtagtggattgatgacattatgtcggctggcatatacgtatgtgtgtgtgtgtgtgtgtgtgtgtgtatgtgtgtgtgtatacgtgctttgctggttgtgttgctgtttcgccctttcccccggtatttcgggtgaaggggaactgacctggcagaggtgtgtgtgtgttgtgtgtgtttatgtagatgtggctcgatggatgtaggttgtgctgtattgggcgatgagtgatggtggtggtggtgtgtacatatatacttacgtcgccctgtgtgtgtgtgtgtgtgtgttttttcctaccgtatctttgcgatggagcggatagtttatcgggacaagaggggtaggtggtggatggatggtggaatagcatggggtcatcggggggaacggggtcatttcgaatgggatttctcggtcaaatgcgccgcgccttccgaaccgcaagcaagccaaagagagaagggaagcaccgcggatatcatcagacacacattcatcaaaaagggttcatgcatcatcgatctactaatgcgctcaccggaatcgagatggtagtggggtggggtgatcaagattgggaagcacaccattatacacacactcgtgtttgtggccctcgaaatgaccgagtcgtctattgtacaactttccccgcgcccacccaccgatcccccgtttcaccatcaccttctcgtgtgtgcctctcgccaggaacattcatcatgtcgaacccgatcgtgtcattccctcgctactcagatcgcgtgtatacagtggaccgaacaagtcatcaatcctcttgcacagggagaaggttgtcttttccctcctcccgccaaatcggaagacagctcggacatgcaggagaggtgtacgaggttgtccgagttggacatcttggccgaacgtatttcgccagtaaagtgaaccctgtagaggagcgggacgggggctagaatcgactcgctgtccggaccgaggcgatgtggtcgtcaatatgcgcattggctttcgataggacgatcccgacattcagatgcaacggacctcatcgccgagattgcgggggcataaagcgatgcgcatcgcgcagaatgagatacccccgtatcataaggctcgggaggatatcaatcagacgagttcgtggcttaaaccgagcctggatctcactttacgtaccggcgatgaaagcgttcgcatagacttgtctgatttcggctgccccgctatctatttgccccgctttctggagggagactatgggcgggaccgacccgatgcctaccaagaatgtcaatcaaagtgattttgccttgatctgatctggtcggcctacacgttatgctccgtcgccatatctgggtcttgatctctaatctacctaacagttcgtcgatcatgcgcgaacgcatcggtctcacgatcgttgggaaacattcccgaccgaaccccggatcgtgacctcggtcaccgagcgtacgatttggtcccatgcacagcgatgacgactgctttcgtccgttcgacgatgtcgacattgtataaataccaccagcaaaacatcagtcgatttggcccgcttgtggctcaccgctcttgaccgctcactcggttttcatcagcttatatctaacatctattcaagatgggcctcgacacgatcgttaacaagcatctcaagtacacgtacgataacggatggaggtacgaattctggctcaagtccgagaagaggatcgtctatgatcagtcgatccaacgctgtacggaaagtgctctcgattgatcggtcggacactatgtacagagattcacggaggtcctatggccggacgatacaactatcagaccagctgggttcaagaggtgagccggagtgtccttgctcataccccgcgcccaggtatcgacgcgcgactctttcgctagatccgtaaagacgagatttttcaggtacgggctcactagacgggcgaaacccatcttttccccccgctgatcgttcggcttgtagatttcttgggtggaagagaccggcaccgtggtctcgatcaatgtcgacctcgtcaacaagcggatctttaccttcatgaccttttctcaaggacactgtgagcaaggcagttgggtaaactgctcacttgcagaccgtctgaccatgattatctacgcatcatccaggggaaaaggccgaagaggcacacggtgacaagcgaaatcaagaagactttgacaggtggagaggactagccaagatgggcggacccaaagaccgtcacaccatcatggaacaggcgactctcgaggtggtcgaagatggtcgacccgattatatcaaggatatcgatgaggatgccgagacactgtagaagaggcacgcatcccgtcatgatcctgactcgcccaatccatcgttttttgactgaacagccagacgattcccgcatgcgaggctgtcgtcgataatgatctcgaaaggtggtcgtctcgcactgcgatcgacggctcggatccgagcaatatactagtacttgaggggtgaattgttgtcagaaatagcccgcgcttgacagaattatacaaattatacatcattttcgtccttgggattggcacgactgggtatgcagatcttacagctccaggattatacttgtgacgtgtccgaagcggcagattgggtcgattcgagtcggatcttcagacaggaacgtcattagtgtgccccttgctcctgctgctcatcggttcgacagcggtttcgatgctgcttcgtcggttgagacgctctgcaacgcgagtgctgtgagacagagtcgactcgccccatgccgactctttgttgatcgtagtaccgaaagagccatggtggaagagcactccgatgaggagcgtaacctaacgagtcgaccgtcatcagcatcgatggtgaagagcgcttggcccgttctatgcttacgattgctaccatcgcccagttcagggccaaggtgggaatggccaagctgagcccatggaacgagcgactgtcagaactcgcacgtgccaagttttcagcgatcgcctcggtacgacttacctgcacagcctgtttgcgtcgcacgcctgccagttgatgttgctggtgaaaatggctgagccgactgtcgaatagcgtcagagtcgcgttcgaggagcaaagtgaccgtgtcgcttcggcttacccagcgccaggatccaccacatcactaaaaagaacatctccagctcgatgctagtagctacccgcctcgtattgtacatggcgaacgtgtttgcgatcaggctgttcgcatgtcgtaattagcccaagactgtggctcaaccgggtcaaaccactcacaaatagatggcggtcaggaacaaaagcacaccagcggctaccatgataccgttcgcgtgcagatagaacccgctgatgtatacatactgagccatgcccctccacgtgtctgcgtcgccccaatgaaagtagcacttagcggacagttcatactacctaagcggcctaatcctggcctacagccggggatcttcacgctgaaggataggttctttgtataatcgatgaaagccgccgtgatgccaaagctggccaaagaaatgggcaacagcacgctcaagagcgtaagatgccagacgtgagcggtgcgggacttcatggttggctgggtgttaacggctggatgtgtatgctggtaagataactcggcgctttcgctctgcgtggtaaaagactggctgtacttgattattcctgagagatacgctcggacatgtcatcccgtatatatgccattttgatggccacgggcagtgcgctccggtagaatgatgcaactggaacgtcacaatgatgccgcactagcgcgtgtgttgctccttggcatgcgtgaaccctccgccagttgctccacatctccgagcaaggcactcatcgcactggcgaaagcttagcggtactggcccgacgcttgccgtcagcgcagatcgggctattcactggtcattggtgcagcagctgactctccttgcaacagttatctcgccgcggtgctaggttcgccgggaccggaaattgtgtcttcggtcatcgccgccgccgagccatacttgtatcaagggtcctgccgacacagcttgctcggcgacatggtggtcccagaagagctcttttgatcgtctaccaagacactcgcgagtcgaacctacgtgtatgaacaccttgaacagccgagatgcacagtggccgtgcgacgggtcactgtgtttaccattatgtcgctccgagcgatactttgtgcatcatttgtacaagggcatacaagcccgtgaccgaccctctaggataatgttacatgctcatacagcctgctgtgtcttagttgtggttctccaccttctccgaaaccgctaagaatgcgcacgactctaatgagccgaggaaggtgtgcacacgcggtgcaccgagacttacccttgacatcggcctcgaccatttctttgaccagaccatcgaaatcgacctttcgtttccagcccagtcgagtctccgcctttgtacagtcaccccacaacagctctacttcagccggtcggaagtacctaatatcgtagtgatcagcaacagattgggatatgagggctgcccctgggaacgactcacttgggatcgattctcacaacgatttcttgtgtagcttcgttcctcgcaacctcgtcgacgccctcgccttgccacgccagcttgattccgacgtgtccaaacgccttttcgatgaactctttgatttcgtgagtctcgttcgtcgataggacgactataaccgacgagagcatcaggtttggcggtctcgatgatggacagatcgacgccactcacagtcgtcggcctcgtcttgttgcaacatcagccacatcccctcgacatagtctcgagcatgaccccaatctcgcttggcgtatacgttccccaagtagagacaatcagtctgccctgcgttgatctccgcgacggctctcgatatcttccgcgtgacaaacgtgcgaccccgtcgaggtgattcgtggttgaagaggatccctgcaatgggtagttcaaggtcgtgtcagcttgagccgcagcatacccgaaagaattctcagccactgaccattacaggcatacatcccgtaagcctctcgatagttgacgacgatccagtaagcatacaacttggccacgccgtacggcgacctcgggtagaaaggtgtcgtctccttttgcggtgtctcgacgaccttgccgtagagttccgaagtcgaagcctgatagaatctcgagtgcttttccaatccgcacgtgcggaccgcatccaaaagccgcaaggttcccaacccatcgacatttccagtgtactcggccatctcgaagctgaccttgacatgagactgagcgccgaggttatagatttcagaaggctggatctgtgagataatgtagaccaggttggctagaaaaggccgatgccattaggtttaggttaggagttccagaagtggacttttcagctagctgattgtagactcactcgaatcggtcactagaatatcgcgagcggtagcggaggctggtgagctgctatacaataccgcgatacagacagtgccgactcacagtctccgtagtgcaagaccatcctaggtttgttgtgagggtcctggtagaggtgatgaagccggccggtgttgaaagacgatgaccgccggataatcccgtggacttcgtaaccttttgatagcaacagctcggtcaagtacgatctgatgggatcgggcgtagaccgtcagcatacgatcagatctgtaaggaataaagtacgactgacccgtcctgtccagtgataccggagatcagcgcaacctttctcttcctaaattcttccggcgagggcaagtccctggctctgaaaaggttggacgggttgggcgtctcaaagaccacatcgacgtccgatgacacagactcggcgggagactgtttcagaggggagaccgttgccgatccttccatactctttgttacaagcatttcttccatggggtgggtagtaaactgcgggtgagggtggatcgttggcgatgcaaatcagtgtcgggatctcaagctgagctcaccatattcgccaagtgttatctcaatgcgtcgagatcgatccgagtacaggccaggacatcactgcatgggcatgattcgtttggcgatataagtgcaaactgaatcgaaagtcgactcacccgcgaacgcacacacacgggccactcgattgcgattgcgatgatggatcgggcgatcggatggctagaaaaacacggttgtggtgattgatgatgatcgtccaggaacgcctcaccccgtcccccgcgctcgtgcatacagatacccgaaccacgcggttcacagctgacaggcgatggcgtatgggcaggggcgggggtggaggaagcaacaacccggcgaccagtcagtcacgccatccaagcccctcggccgcggcgttggcgatgttccgatcgacctctttatccgatcaatccgcgagaactacctccgtctagggtccgtctatcgtcgtatcgcccgtctcgatcgagggtccagagggggtacacgggctatgactagtagtcaagtagttaccagctagcagtcaagacgtttcgattcggactgagatcactcgacaagctgttcgagcgaacaacgaacgaacacagccagtcgtcgtcatgtcggaaagcaaatgtgagtgagaggctcgcgatgatcgccataaatattctgaccgagttctcgcctatcagccgttgtactggtgaccggaggtgagctgcggctggtcgaaaacacctagtcgttgatactgacgacttcttcattataggaagtggcctcgttggttctgcgattaaatgggtaatcgagaacgaacccgtcggctcgccattcggcaggaaaccggatgaagagtggatctttttgacgagcaaggacgtagatctccggtgagcttggaatcgtctctctcgtagctcgaggtttccgactgatgatagctgctacagcgatgccaaggcgacccgagaactgttcgacaagttgaagccaacgcatgtgatccatttggcagctttgggtgaggatgcagataccctagcccgtggaagcctctgctaaatccctgcatgcatgtctttgcgacctactctcgaccgtgatctgtcgtgctcagtcggcggtctgttcgccaacatggcccgaaaatccgactttctccgggagaaccttttgatcaacgacgcggtgctcgagtcgagtcatcaagccggagtatccaagctcgtctcctgcttgtcgacttgcgtcttccctgacaaggcgagtcccggttcagctaggccaatacggtatgggcccacgttgatcctctcgtatcgggtcttcaggtgacatatcccatgcgggagcaagatgtccacaacggtcctcctcacaactccaactttggttacgctcacggcaagcgattgatcgacgtccaaaaccagtcagtctgccccgttcctgttcattgctttatcgtgacgtagatgggttgctgaaaagtgagccgggagcagtgcctataacgaccaattcggcgacaagttcacctcggtcattcccactagtaagccagtgccgttccgcttgctcaccggccgaagctgagcgggtcgccctatagacgtatacggaccgggagacaactatgtaggttttcagaggttcataactgaatctacgtactgatcggtgactgcttcatatctgatagaatttggagaacgcccatgtcatgcccgccctcattcacaaatgttacctcgccaagagtgtgtccgattgtcactctgccccggtcgtcacaccattcgcttatacaacttatttggtcgactcagagaacggtactcccttcatcgtagcaggtaccggcaaacccttgcgtcaatttatctattctcgggacttggccaagttgttcatctggacgctacgagagtacgacgagatcgacccggtcattcttagtggcaagttatcgagggtctcatcgaacatcatgacgggtagctgactgtgattcttttacagttggggaggatgaagaggtctcgatcaaggaggtcgccgatgccatcgtctcggcgctggatttcacgggagaatattccgtaagcagccgtctcgctacagactgtatacaaagtcactatcgctgagccacttttcctgttacagttcgacacttctagggcggatggacaataccgaaaaccggcgtctaatgacaagctgatgggactcttgcccgatttcaagtttactcctttccagcaaggtacgcccacgcatcgaagaacatgttggtcggagggtgctgacacatacgagtcccctacagctattaaagagtctgttcagtggttcgtcgaccacatcgatgatggggctcgagtgtagatctttgcggtcattagagattttgggcgtatcgtcagatatgattgttgcatagagcatattgacgggaatacggctacgaagaggatccttccagcactcgaattttcatcgcacgattgattcttggtcaattgtctgtctcaatcaggagctcaaatggtgattcgcctaagcattcgggacggtatagtcgcgctgaaaatcgctgagatttaggccacgatgatggtgcacgtgggtgatgtttcaagttgcgcggaccggttgacggtcggacaaatcacgacaggtcacgacccgagtcgaggtcgaggtcgaatgctcgagctcgaccactggaccttcatgcaactcgacatcgaacgtttcccgggaagcctggcgcccgttgaacgtttgcggccgtgtcgatgcgcacgtgcgggaccggaaaatggcccggtgccaaggctagattctccattttatcacaggcttcggagtaatgatatctctatcgggatcgaaccacacggggccacctggtcatcaaagtatgggtccggtgaaaaggttgcagatggccggtcaatcagggctgccgtccacgtttgtcgatgccatctaggcccgaatcatggccttatatactttgactgcccagcttgcagacgtaaagatggcaatctatagagttgctcgctacagagacatcctcatcgtcatacctgcaagatgttattccaagccacctcgctcgctgctctgctcctgcctctggctttggccgccccggctccttcccccttggaactccgtaacaatcacgtccatgccaacgacattaccccggtcgtcaaaaacgtgcaggtcggcgttcggccctattacctcgtccgcaacatgaccgactcgcccttgaaacaaaaactcgagtcgtgtttcgaaaaggacatcgatgtcacgcagttctccatctcgcatcgaggtgcagcgttgcaattccccgaacatacggtcgagggggtgtatgctgctgctcgtcagggagccggtgtggtcgaatgcgacgtctcgttcacctcggaccgagagctcgtttgcagacattcgcagtgtgatttgcatcagaccaccaatattttgcttcaccccgagctggcggccaagtgtaccaagccattcgttcccgccgccaacggtcagccggctactgcgacgtgttgcacctcggacatcaccctggccgagttcaagtcgttgtgtggcaagcaggaaggattcaacgcctcggccaccaacgtcaaggacagcttgtatggaacgcccaattggagaaccgagttgtacgacacctgcggaacggtgtttacccatcgcgagtatatcaaggccgtcgacgatctcggcttgagtttcacctcggaggccaagttgcccgccgtcaagatgcctttccagggcaactacacgcaggaagactttttgcaacagatcgtcgacgagtttgagcagtccaacattcacccttcgagggtgtggctgcagtcgttcgtcctgagtgatatcctctactggctcaaagctgcgcccgcattcggggctcaagctatcttcctggatgagcgggtcgagactccccaaggttacgacgccgccgttgcctcgatggccaacctgaccgctcagggcgtcaagatcgtcgctcccgccttcccttacctcttggccgtggacaatgcgacggaggagatcgtgccctcgacctacgccgaggccgccaagtctgccgggttgaagatcatcacctggtccctcgaacgttccggcccgctcgccaccgtcaacgccacgcaaaactactattactcgaccctgctgtccatcatcaagacggacggccagatgatggaagtggtggacgcgctcgctcaaaaggtcaaggttttgggcatctttagtgattggcctgccaccgtgacctactatgcgagctgtctcgggttgaagggtgggttccgggatgccgatcgcaattagatcgaagggaagtgtggggatcaaacttgaaaggggaatcggaagaagaatatctgggaaaagatcgaatgaaggaaaaaaccgaaagtatagtctcataatttccgggtatcatagaaccttgtaggccggtacaaactcgatccatgctctcctctcgaatcgaccgtacctagtcgaacgacatcctctcccacaccgcatcctcgagagcgatggcgacctcgatcgcaccggtcgttccgactggcaagaggtacgccaacccgtcgacgagcgagaccatcgtgaacggcgtcgagaccaacctcggctgcgcgtcgtcgaacgtggccctctcgtacatccctagcttgttccactgacttatcaacaagctgcccgtcccaaagcggaagacgtgtttaatgcgttgtttatccggttgacgggcgatccaccgcatggagcgctcggcctcgttcaccaacgtaggcgtattcacggccagcatgtcgtgtaagcacctcgccacgtcgcccaccgagccgtgtcggaggacgtcgacggggatctcggatgacaagcaaaacaaggcgttgggaaagtatttcccgggaatgtcatcctcgcgcatcttgcctctcatgttgatcggtgtcaagatgtccgtctcgctcagttggctggtgatgacctcgtcctgcctggcctggagtctggcgcgatacatggtctggaagaggtaagccgtcaggacttcaaaagtcgaggtccagccagaggtcgaggcttcgagcttgagggcgtcgaggcgttgacggggaaagtgaatgaacttgcccgtgacaggagtaggcatgtaggccgatgagtcgatctcgtcctcgccgtcgttgttggggtcctcgccgtagtcctcgtcgcggtcctcgtcgttggccggctcgggcaacaaatcaaagtactttggctcgaacccgtcatccgctccattcttgatgcccgccaagaacgacctgatcgtcggctccttggccaaccccgtcggttccccagtcccctcgacccgtcgatcatctcgtcccgagagctttccatacatctcggacaggtcctggacaaacgtcgtgaacccctcggcatcgcaaacgatatggtgtatcctcacgccgagagctaccccgccgcatgcgaacctcgtgtgctggatgacgagcagcggggcttcttgtacggcttgaggccagggttcaaagggtggcaagagcgcattgccctcgtccggtaactgtaagatcttgctaggtggagagctccccccgttttcgggtttacctaggaggtcctcgattcgatcttcggactgggcaaatatcaactctgcccccgtgcctagcttgtggaggaaaggtgctcggtcaggtccgtcgaacaacctcaacctgcccgtcaagtgggggtaataatccaatgtctttgttgtcgctgtttctagcttgtccgcagggaaaaagtctttgctcagcccggtggtggttggtcgatcgtacacgtagacaacggcgatgggtaccgagggtgagaccagctcgtccagcggtccgagatagaacttggagtccgggtccgaggtgtagggtgatagctctgtcgggtcattgcaggtgatggcacgcctggacaagacgttgaccggcgaggatggattcgtggcgggggtcgtggatgacgacgagatgatgtcgatggtcatgtcgatgaagatgtgttgttagttgttgccgtcttggttgagtcaagatctactacggggaaatcgatcgacgacgatggttcgttgtttcgactcgacacctcgaccatttctatataccttggtaaattcaccttacaataccgctctcgcatctacatcgaagaacaatgtccctgaccaccatctttgtgaacaaagaagaacacaagcacaccccccaggttaggtcgactctggttatatgccgcctcgctcgctcgcattgttgtttcctcttttgttcacctaatccgatcgactctttgttttaaaaatgaccaaccagttcccactctccatctcaatcctctctgcgatctcccagccagactcctcggcgatgatccgtatggaatcgatggtacgtagtccgaaacgtgggtgtaaaccggtgaatcgttggtgaaactatcgccatggtcgtgtcgtcgtgggagcaggggacaaaggccgagcgagtgtcgggtgtcgaagcgtcgatgtcagttctagttgccaccggggtcgtgtatcacagcagcacattcgttgaccagacgagcaaacgagcacacgacgttgcataccttttcatcaccctgactgtggaaccccccttgatcccgtttgaatgcgccgtacacgctgatccaccccgtacgccctatgaggtcgtcggcctgcttgaagatcgccgtgggcgtctcggggaatggagcgcagtggaataggttatctgtcgcaggacgggtccagacgcaaggtgaagtagcatatgcagaggaacacggggtttgagccaggtccgtcatacccggagccgatacaccggagctggacgtactgatcacgatcccatcaaacacccggtcctcctcgcgctcgtgtttgtcgttgaaccgggtgttcaactcgacccactgtgcggggtctagtacgtccagtttgaccgacaagatgttcggcgggagaactttggtacggtagtccgggtttgggtcgtcggcctcgaaaagggaggatgggcttgatgtggggaatgagatgagatggaccatagttcatcattgagatgcaggatcttttgcgtatcgtcccgtcgtctggcctggctacttgcaggcacggtacgacctcacttacctgcgctcactgcccacccaatcgacgtcgttccatcgattggcgaatgcgatcaagtgttcccccgtcccactggcgacctccaagatcctcgccctcgtcctccccgtcggcctcttcgctgcgtcccttctggatcgatcgatgcgagatccgagtgcattgataatcggtcccacgttcctacttgccgatcctgttcaggccgtacacgcaagtatgcacacggtttcagattctgtccactgtacaggatcgaaagatacgactgacctgcgacagaagggatggacgggtaagtctccttgtcgttggcagcgtcgtcatcgtcgtgccctggctgtttttccttgatccccatgattcctatgagaaccccctgactggtatgctatgcaagacctggagctgcactttgccattttcccccatcgatgacgtcgttttcttgggtttttccgagatttccctttcgatttcgatctcgcgctagcttggaccgacgacttggatgaaaatggatcagagacttgtattcaaccactatcgtctactcatcctggacccccatccaaccctgctacacctcgtctagctcgctgctgtcgttcgccaacaatcaaggacgctgccctgcccgcgtcatgccagactttaccggcagcccagctcgtcatcccctcttgtcacgaccgatcagcgtctactcgatccctcccgaactcctcgacgttctcgccgtcaggtccatccgttcgacccctgtcgacgcactcaatgaggatgaacagcaacaaagtcagcccgggaaaggcgaacgagacgatgccgactccaccctcgtcgacgctgcgaacctgccctcgggttcgagcttgacttgtcagacctgcctcggcgtatcgttcgtctcgctcggcgaacaacgggctcatttcaagagcgattggcataggtacaatgccaaggtgtccatggataacaagggaggagtcgcaagctcgaagaggggagtgttaaccgctgaagagtttgaagagatcaacgatggtgagtccatcatggtcgacagggtgatgccctcgagctcaacaagacgcccaccttccatcgacctgatgacctcacaggcgtctcttcgttgtcggggtctgcgtcagacacatccgaagcgtcgcagtccgcagcaaccgacaggatcacccgtctcgtccgtaaacaacgtctgaacacgtccacatctctggacccgacctctatcgattcggacgaagaagccgagcagaccgagtatcgacgtagagctgaactcaggacggctttgatctggttcaacgtgaggaaagattcggcagtccctcaggatctcgtccccctggatacccaactcggcgtacaccgtgctctcctcccctcgggcctcgtcgacccgtcgacctttctccccgccctccgttcagtgcaactccccgcctccgaaccttttgatcagcaggatccctccagggaacgaaagatcaccctcttgatggtcgccggagggcatttcgcaggcatggtcgtcgggttgaaaccgctcgacttggcgcacggcaagggcaagcgaccggaaaagcaggacgtcaagggtgctggagagattcgggtattgcaaagcaaaacttttcatcgatatacaagtgagccgccgtggtccctctcccatgcgtctagtctgctcgacgacgacggctcgtactgattcgtgcgaatctccccggcgctcccagcacgtaagaagcaaggaggctctcaagctctcaacgataatgccaaatccaaagccaagtctgccggagccatgctccgtcggtacggggaacaatccctgcaagaagaaattcaggcgctcatgatcgaatggcaagacgagattcggtcgtcggaaaagatctttttgcgagcgagtacggcgggaaagaggagtttctggggttatgagggggcagtgatcgaaaagggtgacgagagggtcgtcaccttccccttccccacgagaagacccgtgagtgcgatgtgcgaacgccgcccgaggcatcggctgatgtgtgcacacccacaactcgctgtagaccttgtccgaactctttcgatgttattacgaattgacccgggtcaagatctctcatctctcggacgaaaccatccaggcgctcgaagaagcgtacatcgcctcgcttcaaccgaaaactcgaccggtaccgtcacaatcccagacgccccaacaggtcaaggaaaaggaaaccaaacccaagctctctgcagaggaagagtctcgtcgggaacgtcgcaatcgactgatcgacatggtccgcaagggtcggctcgaacccctccaggcgttatgggaaaagcacagcgggacgtttggcggggtcgacgaggtcgtcgaggaatgggcggatgaagggaaagggatgacgctcctcatgatcgcctcgcaagcgggccaggaagacgtcacccgatggttgctcgaggacctccgggcagacccgactttgcctctgggtggtagcggcaccgccgaagaaattcctgaagccgacgagacggacgggaccagcacgccgacgaaaggacgcggtcgaacggcgtacgacctcacctcatcgaaacccgttcgcaccgtctttcgaaggctcgctcatgatcatcccgagtggcacgattggatcggtagagcgcacgtaccctcgggtttgagcgaggaaaaggaacaggaacaggaaaagaaaaaggcggaccgacgcaaaggaatgagggaaaaggccaaagaaagggaagcgaaacgacccattgcagagtctgccgtgcccgaacccgctgctcctgcaccaaccccggccaaaccgttgacgggtccacaaaagttgggtggagggcgacctggaggtgacacgtcgggtttggccggactcacccccgagatgagacagaggatagagcgagagagacgggccagagcggccgaggccaggttgaccggcaagtaaccgccctttgagtcgacgttagagtcatcatgtatccacatcgatcgtcataaagatatttacgcgttgtcaagaggtcgtttcgtgggtaggatcgtgagcaaacaagcatgggatgcgaactgcgtcgggtctactcccaaccgtgaatggcagtgacccatttggccaagttgacgttgcgtctcgagctctcgacgatccaagggtgtttcaacaggtccctcgggtatggcctgtcgttggccgaccggatgaggctgtgtagcatgacggggtcgacattcagcacggtctcggcccgaccttcctcggacacagacgtaccactgagccaaaaagtcttgagcgccatcggtccatacgatcttctgctcgggcgagtcgatcaatcgaggcacgggttgcgccacaataaagttcaacaactcgatcggtccgccgagtggaggttctccttcgggcggaaagggaaacctgttgtgcgcgacctcgtgcagggtgagtcccagcgaccagatgtccgacttgatcgagtacgagagcccttgaatacgttcaggctgcgggcaaggggttcaagtcgggggttagctcgatattccagcctgatgtacgcctctgatgctcacggccatgtagaaggacgtccccgtaaacgtcccagcgaaactgtccactaattctccgctcacgccgaaatcacacaacttgacttgacccgccttggtgaccaagatgttgctcggtttgatatcccgatgaatgatcttgcgttcgtggaggtagtcgagcccaccgaggacggcctcggcgatcttccccaagaccttttcgctcgtccgacctccccgtcgagtgatcttgcggacgagcgtgtccagcgacccggcctcgcaaaattccatgaggataccgatgcacgtgtccgagctggtcaagaaggagccgtagtgctcgacgacataaggcgattggcattcatttaggaattgtagctccctcaaaagttgcttgtggatggccggattgggcgacgtcgtgatcacctggcaagagcgtcgtcgtcgttagcgggtcatttgatatggtatatggcgaccaagcgcgagctcaccttcatggccaggatcttgcccgtcctcttgtccttgaccttttccacggctcctccagcaccttctcccagtctcatcaacgtctcatagtttttgggatccacctcgtcctccatccctcctcgttccctcagactcgccgccctgtcactcccactccctctgctcgtactcctccctaaattggtgatgccatcgtcgtcgtgtctcccttccgtactccctccgtccaaactacccctcgcagaccctcccggggtaggcgtcggcgtgatcctcatctgactcaacgcgtttctcaaatccgccgtcatccccttgaccgtcctctgattctcgtcatcttctctcctcccgatcgtcgtctgtcctacggtatcgtaacccttcgtcggcgtcctcatcccaccgtgataagcggtctgtatccctccaaactcgtcgtacaccggggaaggctgggacgatccgggtaggttgtgcgggttgacggggttcgaaccgggaatgggaatgttcaagctcaacgccggggctttcctagtagtcgacgatgaactcgaagccgaggttgagtttgaaatcgagccgatcgaaagcgcaggaggaggtgcgggggaagaagagctcgagtgaccgttccgggaagtgacaagtgacaactttggtgcacctccatgactcggtgtcgactgcccgcgagtgtgcaatacgggtctcctcggcggcggtgttgccatgacagacactggagtaggtgcgtacgtacctcccgtcggatcggctgacgaggtggacgagctcggtcgaggaggtgccgggcggaggttccacccgccttcggacgactctccttggtggtcgttataactgcttgctgagggtgggtcatgcgtgagacaaggagaaaggggcatggctcagagtcagctcctctctcgacaaagggcttggaaggtggtggtttaaaggaggatggattactcgggtcgttactcacggacattggccagggggatcttgagcttgatgccaggttttctaggaggtggtgcgtccatgtcgtcaggctacactcgttcagacagctactgttcggaccccgtgataatctggtatggcaacgatctacgtgtgtgtttggcgtcgatagtcacggtcgtctttcgatcttgttacgtcggtcgtgtgcacgtttgctctggtacagtccgggttcgtctacttgtcggtctcgtcgttttatggtaccggtcaacggggcaaacaggctcgttatcaattcctgatagtgtccctgcgactcgatcgtatcgtaataagattatcattcagacgatcggatggaccatgtcgacctacttgattgatgacgatgggttgaggatgtagaccgtgtttcgtgagcgatcgttaccggctagtttcgtgaatggtgatgcacctagatacacaatcaggtcctctagtcgagactctacctatctatggtgctgtatccgggcttgactgtcggtatcacgagattgtcgacgatgtgatggatgaagatgacttgttaccacccaagctgctcccgattgagaacttgcgtgtaaactccagagagcgagctcgcaacggcaaatcaacttgctcgaatcaattacaactacaactcgattgactatatagccattcaaacacctgaacatcatctcagacagtacataaggcagattttcgaagcctgattgatactctccggccaagacacggaaaagcagcgcaattctggagtacatcgagtctcggtcgacgacctgattcccagcgataccttgatcccctcgtccgacccccgtgttcaatacatacaagtccttcatccacattgttgcctccatggatcctaatcggcgttccgcatctccagaccgtcgttccggcgcttcccgtcgacccaaagaactctccttttacaagaaatccgcctcgtcctcgtctcaccatgcgagtggaggagctggagctggagcggtaggctcattcagtagtcgccgagacccactggatcgactggacgataaacgaagagccggggctgctgctgctgctcctgtgcccgctcctggggctggacaggatgtccccggacgttacggaggaagtaggggggaatacaatcgcccatcgaccggtcctcgaggggacgactaccgtgatcgtcgtgatgatcgacctcgctactctgatcgagactcttacgacgacgatgggcgaggtcgtggccaccgcgatggaggtcgtgacagcggtcgaggttacgatcgagaccgaacccgtgacgaccttgccggcgaatacaagggtggggaacctctccgtcgggttcccactcgggacgagagggatcagggttcatcctcctcttaccgaggtggagacgacttgaggcgagtggagacgaggaacgaaccctcggctcctgctgccaaacgtcccgcccccacatgcgcaccgtgagtcgacgccgacgacatgtctgttttcctccatgtaccgatcgaatgctgagatctcgaccgtgtgccaggatcgcgtacggaccgatgattgagatcattgcgaacgatcgtctcggccgcaaaggtgagcgagccgtccggacttggcatactctaccttgctctatccgggcctgccctgactttcgcacctcttgtcaaccttccgcagtccgtgtcaaatgtctcccctcggatacggtgggcgacctcaagaaactgatcgccgcccagacgggtacgatcgcgagcaagatccagctcaagaaatggcaagtcccactgcatcgatggctctagctcgctcgagtggggcgctgacaagtcgtgcatggtggtccacaggtatacgacgtacaaggatcatatcgagctgagagattacgagattcacgacgggatggtcagtcatccagcgtgctgttccatgattcatcaccgacatgcatagactgatggcgttgtgcttttgctgtccacagagcttggaaatgtattaagaaatttcgtgtcaggcggacgaatcggaagaagcccaacattatgcccgcagatacaattcccattatagccaccatttggagcgcgtaggaaaatatccagctcgcgttcaccactcaaacaacacgattacattccacttctgggctctcggcgttgttcccttcgatcgaaaagctccaggtcactgagttgtttgctactgcgagttgacagtcgtcaaatgacttgtgacgtaccacttccaggcccatacggtattgtcagaatccagcgatcccgcaaagaccgttgattccaagctggccctcgggtgaccaggagagtcggcttgaacagtcatacgaaggcgaagatcagagtccgtcagtttcccttgttctacagagcttcctgctgcttccagtcgaatagaggtctcccagatttcgggtcgtcgatgtgtagtgataaagagaacagggtcttcctcggtggtaatcctggctccaacatcgacagcagtagtggagcggctggcagcagcatcaggatgatcagccgtcgagttgccgttactgccgataccaacgtagagtactgggaaattgacgagcgaggcgagctgttcaagggccaagtgtacctctgacgagaatctagaggattggttcctagttgcggacaccaaataccacttcagtgttcctttgtttttggctctacgaccggccgtgtgattcgtcgcagtcgaacagttcagtggtggtccacatctcattgatgactttgcaagtacatagtaaagagaggtcctcgaacgattgggctagcgacgaattgctgatgagagtttggcccagatcaagagtcaccatgtcgggtttgacgacttgaatcgtgggcgcgcataatcgagagcacaatcatcttggtccaatctattcatggtcgagagtcaggtttcgagctccagcttgcgacggacaatctgagggtctttcacttcggaaatatatttatacagagcttgactggaccatagtcatcgttatcgtggtcacgtccgaaacggtgcgcccgcgtttcacctcgtctctactttacaacccacgcccgcctccacatcaaccaacgtcccgcatctcgacagcgtccccgccgtccggtcgaccaaacaaaactcgaccgactccggcaccctgtatcaacgacgccctttttggcctagccgtctcaccggtcgccgttgacccgggactctgggcgagaaagatcatcaattcggcggcgcgctggtcgtcctcgtcgctccccgattgtagaagcgcgccgtccgtatgtcgcacgcgcggtagtcttgatatctgtttcggcggagtgatctgtcccgaggatagcaacgggggtagggtattgggatcggacgagcccggtagcctcgttcgtgcgggtggcatgcggaatcctaggtcttcgcccttcggtcgcgagtaaggcttggagggtctctcgggtcgagcaggactcgctgtcgatcgtctcaggggtgacccgccgagcatgcccgtcaagacattggcagcttcggtcatttcgcccgtaccctgggtagacgaagctggtggacgtcgaccactcgaatgactggcgctcctgggtttcttgcccgtcatgaacgacacgtacttttcccccgatccgttggccgccacggtcgatgacgtgacaatacccgtcgagatgcgtcgcttgtgtccaagtatcgtcggttcgggacgagtcctcgtgctcgacgtcgacgtcgacgcctgtggcgagggcaagggaggtgggtatctcgatccgcccaacacgtcgccataccgatcgaccaggtacccctcgatccccattgctcgtctcggtggcaccaccggttgttgctgctcgaccatcacacgcttgggcaaggcgattcccagcctgggtccagtccccatactcgcccgtctccccaaacgcgtcaacgagtcggccacatcgggtctcctcgctggcgaagccgcttgcgagatccacgtcttgcctcgccgcttattgatcgcctcgagctcttctcccgcgtcatcgccttttctcccaggggactcgagcgtcagcgccatgagatcgccaggtgatctgaacggggtgcttccgtaatccaacttgcgtttccttcccggagtcaccggggtcctcggcggttcaggcttccatccctctggcttgaaggctggggatggagacgagggtgatccgggctgtctcttctccctccacgcgtgcggggtgtgcaaaggcggtgatgagggcggagaggaaaacgggttctcgagcttgtccaacgtcggcccggctctaaatacactcggccgcgtgcctagcgagctcaatcgttgtcgcaaaaaggtcgctttctacagagtggtcgaccgggagctcgaacccgatcagcgtcaacgcccgtcaaacaagtgcaatgtcggactaaccttggtgatatcgatgctattcaacaaccttcccatatccactggcggctcgggttccggctcgagtatcgccttgggtaaggcgttcacgtgcgtcccattcgcgacgatctccgactcgggctgttgcagctcgaacgggatccctagacccggtgcgtcgacctgtgtctctctcggacccggctgactcgtcatctccggtacaggcgagaacgtcgacctcgcgttgtcgagctcttgcgctgcgtgtacgagtggaattggtgtatgcagaggcgattgaaaggaattcgacacagacaagtccaggttgtcctcgtcgacattcctttcttccgcctcaactgccgtggctggtttctctgttgcgcgcgagtccaaagcggaggaggcagaaggtgggttgtcgtgattcgacggggatgccgatgtggacgccccttccgacggttctgatggtgagcccgctcgtgaagacccgtcctcccgttcactctttccagatctcgccctttcgtcgccgtccgccgattgacctggttccacgggtatcgtcgcatcaagcttctcgcccgaattcgcagagactcccgccgaagaagtctctctcgcgcctggaactcccgtatccccattaccgacctctttttcaacgtttcctacccggctcgcctgatcctctacagtcgtatccatatcgatgcccatcgctggctgccgcactgatcggatctccagagtctctccagagtctcgtcggtctcggctcttctccagtcttggtcgtcgctgtgttccctatctcaaaaggaaaaagggagtcaaaaggtactctttcttcctcttcccttgcttgagaattccagagttgtcgtcgctctcgaccgttcagcccgggttcggtccgaggccggctttcagttcagggcgcctctcttcttgctctttcgagaataagccttgaaagaacgggggaactgaatactgtctggccagcaggagcagggtcggctgaagatcaatcggttcggtccggttcgaatcgagtgatcgacccgttccgatgctcgcggtccttttccgacgaaagaccggctgtatcgatgttgaccttgtctggggtcgcggccgaatcgacctggctggctattgagaccgggtgggcaacgtacggccgcactgggtgccctggatttatggacgatgtgttatctaggatcgctatgctaacccttgatcacgcttctcgtcctcgaattcgtgtggttcgacgtcgatgctgtaactatcttttaagctgatgatgcagttacgaggtgagactgttcgcacccaatagattggcgatgtcgaggaaagcaacagaatgaaagggagcaagtagtgtagttccattccctgacatgacgacatgcaacaatatgcttctctcggtcaacgcgacgacgcgacgcgatcaacaccatttcgagttcggaaccgaaaaaggcaataattggagatactatcccgtcactgcattggcaccctaactggcccatcctgaccgggttctctacagtgacatcgaatcacttcagcgctcaaatctgctgtgctactttcgtcgcaagctgggcaaaacttagagagacggagcaagaaacaagagacaaattgatcgctttgtcaatctccggaagctaaatcttttcagatgatcgtcgtcgtcgccggaagcatatcgtcgttgttccttctttccttttaatcagttcgcccgtgtgaggacaaatcggagccgtcatgaccagtcgtacggcgtttgcaggatctggatcgtactagcgaagagcaggtctctggccagacttcccgtctccctggtattggtccgaaaagactgcagtcgatagatctatccccccatctttgccctttttccctttttttcccacgcgtcgccacacaaagtcaacaaacacttggcttgttccctcgatcgatagaacgcaaactatttcgaacgaccacaacgacaaccgttcgatcacagcgatcgcagcattgcttcgggtcgcgacgtcaactgtatcctcaaagcgaaaacagcaatcgaagtcaggatggcccgtaagcactcaaagccccgctttccctttgttcccgagatctttcgggttggagtgacagcgagctgatcatgtccgaaaaaatccatccctccatcaactaccccctcgctccctttcaatccgaccaacacctcgactttgaacctctcttggccacgcgcctcgctgtggacgaaactgtccccggtgccgatgacgaacgggaacacacgaatggcttcctaacccctaaccccacgggctactctcgctatcgtaggcggaaatcaacgagacaaggccagggagaagaaccaaaaaaagcgagtatctcgggtcgtcatcagctgtgctatcatccccagcaagcagtttcgcgtgtctccctttcttctcggttgagccgaggccctgggcaatgttcgggacgtggaaatcgagattggacgatggaggtgttggaagacccagatcgagaaggttcaacatttgcgtcggcgggactactcggaacacacgatgttcacaccatgaagtgacgctgtgggacctcgagatcctcgctaggacaaatcgggggactcgcgactggagagaacacacgaaatcagctgaacttgagctgatctgcctttgctcctttcccactatcttcccgcctctcctttcttgtcccggaatgtcaactggcgttcatcctcgacacctgaacctctcgaattcgacgcaacgaacagggacgactcggctgccaagaaacagacgggagatcctagaaaacgattagaagagtaagcacaccgttctctccccccgtcgtcatctttccacgcttgtgtcgttggtcccgcgcagctcgtgtaagcctgatactaacgtagtgcaccgtcctcttcttctggagtacaggcaagcgaatgcgttgaaggccaagtgagtgtccgactcgagatcgttaagcttgtcgcttggattcggccccgccgcgatttgtctcctcatcaccggggacggacaacgacgtcgtcaaaatgaccgggaattggacagttcaagcgatataccccggtactgacacgtccttttccatgcgcctctccttccgccaaccaggatcgccgtgagtagatctctcccgactttgacgtcccggatacctttctcgcgcattgcagctcactgccccaacgtctatgctctaggccaaacaagccgccgccgcgctcgccgccgagggaggcgcaccaccacctcctgccaagaaggggggcaagtgatcgagctcgcggctcagctacttcatacatagagtcgggagaagggggacgcgggatgaccgaggcgctctcgtcgtcattctgctggtcgtcgctattgcataccattttgatcgcctttggatcgcttctaggatgatgcagaggctccaggtcgggctcttgcttttctgattgacgggtcgcgccggacgttcccgttgagaagagacgatcgatcgcaagtctcctttttcgaaggatgtttcaacggatcgatatcgagaaccgactttggcaggtataccatgagtcaaagtttccgatacaagcatgaagaaggtggtgaaaagtaccgatcccacgttctcgttgcttcgcgagctcgtcatgtcgtccgttccaccctgctgtgactcgtcagtatcactcgagaacgtgtcggaaagagttcactctggcctcgacgacacccccggactccaacactatcgtcgcaaatcgacttgtaaacatacgatcacctcgcttctcgagcgcgacgtgcgactttggctgaggcgctagatgtcgagcgggaatcaccgtgcactctatcgagggcgtccatgtggagagttatcgagaccagcccgacactatctggagcgcaccattcgtggagggatcacgtccttgtttccagactgaccgctctcttaggtcgcaccctcacgggctacttcgggcttgcgtcatcgcttttggagtcatctcttggcaactgcgaattggcttttatcgaggcgttcaggaataaacggaaatagcattggacctcaagatggtcgaggacgattatggagggtgtgatcgaaaagaaagtctcgcccatagatctatcagagacatccttggaatgatccgtaaagtcagcctgacccacatcgaatgctatgagaatcaatacaacaatgatattgctcagaagcgccagagacgccgtacagccaggcccgatcgtggtcggcgaatgtccgtggacgatcactagcgggtccaacaaggtagaagtgagcgtttgaagatttagcaccggcgagcaccagcatcctcggtctgacaaacccgatctcttgtctgtactagggggaagtcctggtcggacaggtggtgaccttgaactttagcggatttggcgtgccttaggggttaggggttaggggttagggtcgggggggggggtcggttggctgattgccttgtgtgaggtcaagaagtgaagaatgagggggtgagaagagactgggacgatgtgtgattgttgttgtgagatgagttgatgatgggtacggggtgaaggtgatcaagctatagacgaggtcgaggtcgaggcgagtcgcgcgcgcgaaagcgagaaacagagacagagactagacacacaagctaggaattgatcaaaagggtcaaggcgagttgcgtcttttataggttgttacggtcacaatcgaattcgcaggcaaactgtgtacaatgatgttgatgcttgaggaaatgtccaagttgttcgattcactatgtgttacagtgtggtgtgttagctggttgtcaatcatccacctacctacctaccaagtctgtttccccctgctttctcacgcgtcgtcaccacttgggttgatggggtgtttgttattgattacgtaatattcgcccccattgagaccccccttgaccccatcaaccacaccgggttcatgtttcgaaatcatcaacaaacatcatttatcattccatcaacacagtaatggtctacctagtaactaatatcaagacgaacgacgacgacgacgacgacgccgaccaaaccctcacaaacatcatcgacatgtcaccaacatgaacccccaaaccatagtcacacccacggcggaaatccaggtggaggaagaggaagaaatcgggaccgacacgacttcgccggacttgaccgcttcgatccaattcgaacctctggatcgactcgggatcaagctcaggtcgtggaaagacactcgacgacggcaacgacctcgcagtggtagtagtagacggggtcggggtcggatatcgacaaacacggactctggcggatcgttcgaagcgtctacagaggaagatgaggagggtcggatcgaggtcggtttcgagcgggacgtcgacccggggaagaccgaggatgggagttcatacgggatcgctactgtacgaacgggaccggccgatcttacgatggaggacgagcgagatgcgactcgatgtccatgttgtctcctccatcgacgtcgccgtggggtccgatccgaggtggacggacgcctaggtgatgatcacgtcgacaacgacaaggatgacgataacgatgacgacaatgaccaggaacagacgccatgcgcgacaatcagggagatcaaggcgctcgattcagacctcctcttgagcgcaggtaagtctcctcccagctcatcatctcgctatactcctcgagccgccctgaaccagcaagctgatcatccgttctaccaaaccctgcgtccgcaagcagagatcggactcaccctcctcacccgtctcaacacccttcaagcgacgtacgaccccctcctcatctcccactcgacgctgcagacgacctatgccgacttgctgcgttcgacgcaccgacgggcagaggcgtggcaagaggagagggatcgcttggaggccgacctcgtccgttcgggggagagggaaatcgggttgaaagtcgaggtgaggacgttggaggcgaggttgaagaggtcatccattcgcgcgcaaaagtcgctagcggggggcaacaacggcagtgacaacaacgtcagcgtcagcgtggacaagtcggcggaggaatgggaggaagaggtcaggtccaaggaagaggtcgtcaaggatctggtaggccggaacgcgctgttacaacatcagctcgatctcgctaggctgcaagtccaacaacaacagggacaatctcggacgaattccccggcccttctcgggtctccgacgatggtgacgagcggtgccgcgggtgcgatatcggaggaacacctcgaacgccggaaaagagctcaacgggccagcctcgggtacaggtctgggtcatactcgggaccctacacttccacttcgtcctcgtcatcgatcaacccggcttcgggcctgatgtcgacctcggggttgggaagggggacgagacattcttccgaaaacgcgttgtggacgttgaattcccattcgaatgccgacgttcatgtccaaggactgggcaaagatcagggtcgcctcaacgcggacgatagggattcgcaagactttgggtcagtgttggaccatggtacggtcacggggaggaagacgggtaaactacgtcccctcagtctgagcttgtcagtgtcttcccgatacacccacgccggtccgtcgtcgaacgcttcttctgggacccatggcgacgatgacggcaaggaccgggaaggtccgacaggaggacacgggaggaggatctcgatgaccccttctgtgcggtcgaccgtctctgcgcagggtctttctcagagtcaatggaagtccccagggttgacggggagggaaagctgggtgtcttcttccacagggatcgggatgggtgccgcagggtgggatccggattcgatcgtcagggaggcggatggaacgccagtctggcctcaacctctgcgacagacgggaggacaagcagggtcagcggtaccgccgaccgtcatgacgaatcgcccgggcgagtcgtccgtacccggttctggaacgcgatccggatctgggtccgggtcagaaacgacaagcccaaggatgaccatgagagcgtcgtcgggcagtggagcgggatcagtcgggtacagcttgaacggggtcaagcggagtatgagcgtggatcggtcgaggggaggtatcaggagagcctcggtgagttccgtcaagcgagggtcaaacgatgcatgacgaagcactgacgttatcattttccacgtcgcccagggtaatcaaacggtagccagcatcgccgaaacgaccggtcaggacgagacgcacgagcgttccacttcgaacgccactgcggaaatgacatccgatcctgcatcttcgacgacccgacagcgcaaacgcatgtccaggtactttcaggcacccgcctatcgtccaccgacgtcgcccttgatcaacgaagaattctcgtttgcggcttcgtctgaaccggatagtatggtcgaaggggatcgcacaaccgactcggaacgacctgcggaaaggcctttgcgaatggtggattcgaaatcgacccaaacggatccagaccccgaacccgaaatcgcacgagaagagacgcctcgaatgaagagcgacgcgcagatcaaattgacactagctggactgggcatcgaggaggacacgccaaactcgtccgcacggactacacctcagctgctaggtccgtactcgccagcaagtccattcaatctgggccatcaaaacgctcgcgacatcgtagacagcaggaccggcgcgctactgtcgcttatcgaacacgtctccaagatcctgatgcgcttgagacaagccgacgtgcctaatctgaccaggcgtctcaagaaacatcacctggctggaggagacgtcggtcatctcagccgaggcgagatgaaggcactcacaaacgagattggcgagttgcgtacgcatttccgtaacatcatcgaagacgagagacgatcgggcggaggcaagaatccgctctacgatagcatgattacgaaaaaggactttcagctgctgctaaagctcttcaaagagatctttggcgagttgatcgagttgcgcggcatcgtcaatgacgtcacggtcaatccggcggcggccatcgaattgagaaagaggcaagaagccatgcaagcggaagaggaggaagcacgcggccgcggcaagaccgcgaagggggccggcggactcggttggatcgcagcccccatcaccaaactctttgcagcaccgtcctcggacccgcctacaaggcgcacgtcagacaaagccttgttgcagccgccagccattcggtcgtcggcaaaactcatgccttcgacatcggccacgacaactcaggtcagtgtagaattcgcaagtacaggtcagatccggcgcgctaccgctgggcttccagtagtcaataccgatcatatcgacgagttgcccgtttccccagcggacactttgacaaagataccgggcatcactcgccaggggccggcgcagcccagctcttccagggcaccggccattccgctgggcgacggtagcagccgaggtccacctccggggaacaacaggcaaagcttgtatggcatctttgcggggggtccgcaaggggtaccccccaggatgaatcatacgatcggaggacgtcccgcctctggacgccatcgtcggcagctctcgaccgtggtggatgccgtgatcgacgatgatggcccagatcgcggtctcgatgactaccagccgccactcctcgaacgaaccttgcgcccacggggcttgtccgattcctctatccgcacgacttttcagcatcacggtatagaaattcccgccggtcgggatgatcagcccccttccacctattacgggtcgtattggcctgcgacatccgtcgtcaagacgctcggacgaaggatacaggcattgacgggcggaactcagcccctgcccccttcaccaatgtccagctcggcagcggatgacagttccctgtcacaggacactaccgtcgtcccgtcgcccgacttgagtacgaaagctaccctacaggtccgatctcacgaaccccggacaatcatcaagaagcgaagcgcgactcagttgggtctggtttctcccgcttccttgaccgatggcggcggattcttgagtatgctctcatccagctccacaaacgaaccccctcccatatcatccaagcattcttctccgggcattcaacggtcagaatcccgtacgcgacggagtcgcgcgcatctccagtcttgaacctgaggtcatctctcagtgattcttttcctttaactaacgattttcccaagttgtatctcgcaagatcgatattgtataataatagcattcgatcctacaaactggtagttcataatgaaataagaagccggatcatttatcgttgatatggtcatcattaattgttcgtaattgtagcgttgtcgaaccgcaaaagcagcagaccgcagcatcttcaattatctcagtcgatcgattcgtccaagaaagctcttgtgtaatacggcgcaagtctgttcactttgtcaatctcgcatcgaatgtgcgtgatgtgcgttcagtaggccattttcgtgatattcgttcccgtcatgattttcatttcctccagtctcctctttattgtcgtcatcttcgtcgtcgctccactcgatttcgtggttcgcgccagccgctgcgttcgcgagcatggcgttgaccgcatcgtcgaaacttggacccgcgtcctcctccccattttcatcgccgctatgatcttctgtttctccctgtgctcggagtcgtttacggcggccctgggcaatgtactgatccatacgatcttcgtgccattggatcagtctcgtctgtcgttcaatagcattgcagatatatccatcaagctccccttcctcgaacaattcggcgtcatcgatgacatcgatatcctcgacgatgcctccgtccaataggaaccgtgccatcagtaacgaagtaggaaaaacaatttcaggaagtttccggggcgagacgccggacaaaagcaggtttcggaggtgtctggcgtggtattttcgcttgaatctccctaacgctcgctggtcgcagtcatcttcttccagaatttctccagcgtgctcttgttgccacctcctcagataggatactatcctctggctatgctgtggagttcttcgataatccgacgatttggtagcccgcctccgctcatatatcgaccggttcctcatgagctgcgctctctgctcgacttcccagcccgtggttggcggaattgcatgggcaagatcaggaagactgatggcctcgtaggttgcatggcgcggcgcaggacgatccttcgcccgatcatcgtcctgacagttggccgcgtctttcggttgctcctcggtcagagcgatggttgggcgcttcccatatgcctcgattctcttgcgctcacgtcgcttcatgtcgcgctccctacggagcaacttcgatctggcgagtgcctcggccttctgttccggggtacgctcctctcgaacccgcttgaacggaggtcgtgcgtcatcattcccttcatcgcctgcgtcgcgatccggtgcagctcgtttgccttttttcttggacgctgtcgttatcgaagtcgtcgattccccggtgtgtccgttcgcttcatgatggctagcttcgtcaagcgattgcgagtgacggacatccgcgtcggctcctcgtacaaaagtagtagatgtagcttcgctattgtccccaccgacagcgatatccccatcaacatcggcgggtttcttgccgcggacggaaggttttggcaactctttgttcggtagcaagagtttccaaagacgctctccgtcaagtctccctgccccgaccgtcgtgtatacagggggtttctcttgcgatctctggcatgccaataacgccttccagtgtcgaacgaccgagggaagaaaggtgataaacatgtgtcgtctaggcggagccctcctgaccatgtgtctccagacgggaatggtctcgatcggatgaccgatatcaccgaggtattgtcccaagtcgaacacgacgttcaagatctccaagtaacgttcacgtattgtgaactttgaggctttcggcagataaacggccagttcgtccataattactccgctctgagaggtgtaagcgcatgtgacgccttccatcgcagccatgacgatggcacatgcagagattccgggatcccgagcataattaaccgagagggaggcgagcatctcggacaattcggtcgacattttcctgcattccagcaagaccggatgcaccaagtgcaagaaatgtaccgtctcgtcaggataaggctggttctggttgtgcaaccgggatgcatgcggcgtctcgatgatcgccttgatgtggcgcaagaccatctcgacatagctagtagcttgactcgaaaagtcgtatctgaccttgagttcttttctacaaaaggctaggtaggctcgcaatttgtcaggctcgagcccagaagccacctgaaaggtgcacaacaagaggatgtttgatcagtctctgtcgacgtatatgctttgccttcttgtccactcaccgacatttccagatgattgatcactcgcttgtgctcgcctgcagtgattgacagacaagccgcgtgaatgtacttgtcaacgatggaccgattatgcttctttttctctcgaacgagggtctcgatgacgctctctgcgacgtggtacgccctcgcgctgatgtgtgcagggagaccgagcttgaaggttgccaactgttcggtccattccttggccttttcctgcaggacagagtgcaatcatatagtcagtacggtacaggctttcccatgagatcgactcgtctgatagtcagtacgactcacatcgcgttgttgacgatagagttccgcacgaatcgtttcctgtcctcgatatgcgtttcccttggaagtcctcatgagcctcgccccacccattatattatccttgagtagacccgcatatcgctcggtcgcatccatctgctgcagcatctcgtccctctcgtcgaaaaaggtagcggcgactggtgaggtgtaaccgcatttgaagcacacgtagtaagagtcgtctccaggcaggaggaccggtccaccggggcagttggggcatataggggtctccatcgtgccaagtatgcctcggcctcacttggttttggtttcacgaaagtggaagctcgtgctaggtgctccagttgacagatcgacctcgatgcgaatgtctggtccttcagtacgtcaccgatgatcctcgagcttttgatgcaccgagacttttcgactagcactagccgtccgaagaccacacgagagctgaacgtatggtaggtacgggtaaaacgagtttattcagtcccgtatcttttgcgatctcgaggtggtcgaggtggcgggttgatctcgaactgagggcaggcaataagatgcgttctacgtacgcatggatgagcccgcgtaacagtcccgtccctgttccctatgagtatgttgcactgagtctctgtgaggagatgagaaggggttaggaagcaggtagagtgcgaccttttagtttaattgacctactctagactttgaggcggaggaggaggagaaggccgatggtgattgagctgagacttgtagtttaccacgtttcgagcgaattcaatcctgcaagctgggacgacgagcagctagctagctcatgacaacacaacccgccaagcgatggatatcatcgacatcaacttgggtcggcataagagttaaccacacacattcccacttcagaggctcgtcatcctatacacctcaccttcacagagagaggaagatctcagatcgtgaccccatcttcctaaccgatacgtagcctacgagcacctcgaagatgaccgaggactcgcggagcatcgtaagcacatgatccgacatcgagacatcctcgcccatcaaatccagactgaccatgtttctgcatcttggaaacgtcatcctctcactatcaatgcgcgaatgaactctcttgatcttccatgataggctcgagtttaccctcatgtgaacgaaaagttgggtcggtcgtggtgggactacggtaagctccgatagctcttctcgactgcgcatggaccatacaagggttcgcgtatggcttgaaaccgacgaggactgacgccgttcatcgtgccgtttgtagacaacttgtcggtccagtggggtacgcaggatcactatgagatcgtccgaaaggtcggtcgaggtaaatactctgaagtacgtctgcccagtccgaccttggcattgtctgccgcttccggttgcatcgctgaacatggcctcatcgcgacccgtgtcatcaggtattcgagtccatccacctgccgtcgtcatccaaatgcatcgtcaaggtactcaagcccgtcaagaagaagaagatcaagcgagagatcaagatcttgcaaaacttggctggcgggcccaacgtcattgcgcttctggacgttgtcagggatcctcaggtgagtctgatcagggctcgtcctgtcgattccggatcgtccggtatactaaatcaaggatcacatcgcagagcaagacaccctcgatcgtctcggaatacgtcaacgtgagtccaactagaaagtactagttctggctatgttgaaccgtatctgatctacccatcatgccgtgtgtcttcgatctcgtagaacactgacttcaagaccttataccccaaattctccgactttgacgtccgattctacatcctcgagctgctcaaggtcagtccccttgccgtcattccgcgtccaacaactcgcctcgtcgtgcatgctgacacatcacaccgcgatcaacctccgcaggcgctcgacttctgccactccaagggaatcatgcaccgagacgtcaagccccacaatgtcatgatcgatcacgagaagaagcagctccgactgatcgattggggtctcgccgagttctaccacgccggaacggaatacaacgtccgggtcgcctcgaggtacttcaagggtcccgagttattgatcgatttccaagaatacgattacagtctggacatgtggagtctgggatgcatgtatgccagtatggtgagcgtcgccgttgatctgcctcgataatcgaccggaaagctgataagcattgtttttcgggcgcgcttcgatagatcttccgaaaagaaccgtaagtactgcctgatcgagataccgatcgaagcctcgcttactctagattcggcaacgcgctatgttcagcttcttccacggtcacgacaactacgatcaactcgtcaagatcgccaaggtgttgggaaccgacgagttgtttgcttagtgagtcttgctaccggatgcatgagagggtccggcacgaagctatactcacatgaggcgtcattcgtttagcctggagaaatacgacatcgacttggaccctcaatacgatgagctgttaggccgttatgcccgcaagccatggtcgaggttcattacgagcggtgagtagtttgccgggccgtgccgaggcatctagactcacgccgcgccgtcatgatctgagtaaattagagaaccagcgatacatctcgaacgaggctatcgatttcctggacaagctcctgcgttacgatcaccaagagaggttgaccgccaaagaagctcaatcgcacgcctactttagtaagtgcttccccctcatcttcaatgctaccaccttgttcgcgccctgacatgtcttctgcgatccgatagcccctgtctacgaacaagcacaggagaggcgggcttgagatgaggtgcgagaaataatagattgagcggaaaatatacaagatccgatcgatgtatgactgtcaagggcgttgtctggtgttttcccgtcgattcatgtttcgagatccgttccaagcattgacactctcgttttctgggataatttcggcagggcggcaaaccgatacatggtgtttccggcgacacccgttgtgctctcactcctactgcgcccgctttcggctgatatgattgtcttccttgctggagcagcctggtctattctgtatccgacgtgaggagcagcaaagctcgaaatcggggtcgaggccagttacaccaaggctattgttgacacagcatcgctttcgacggtgaagtcgcttttcgcaagtcgggagttcctgatttatacagatgatctttgcagtcctatcagatggcgtattcgggtcccacctggtgagcggcattgtggtatcagtcgagccagtacgctcgaggagggggtcgagctggattgaccttcgttgtctcgtgcctcctgatcttgctcgctaccggcacactcgacccgttcttacctgcaatgcaatcatacctttccatgaacaacaaaaaggcctctaagagaacaaggcggtcttacctttgacacagctataccccgtcgtgaacagcacgaaggtcttcagaaaataaaaagcacatcacttcagttggctgcagccctgcagcgcaggcgccattcaccgatcggtaactcaccgggattcatgagcattcattctcgtctttgctttcgtccgtcgttcggcggtccacgcggcaccgtctcgtccggtttttgaagagtcgacatctgcgtgccaataagcgatcctgcgctggcgcggctctcctcatactaatcgaaacaagggctccgccagtcatcctgactatcaagagggttgagcagtaccactttctgccggtcgtcattattgcgtagagtcctcccgcctcactatcttatgttcccactagggcggattgagtggagttgcagcggtttaacaaagatgaagcgcgttccctcgttagagaacctcgtctatcagtggccagtaagacgtcccgtgtcggagtgaaagctgggcggaatcggatacaaactctccaaagccagactggtcaaggttgcgatctccatacctgagatcctgttgctcatggaacacgtatgtcaaacactgtctgaacccctcttatgagtgtcaagccctcatccccaacggttgatgttaacggacttaggcagatcctaaagcctgtgatactgctgtccagttctgcttgatctgcgccatagccttttacaccgcaggccgcccatcatgttgcttcaaaccgactcctatgtgagtccccttctcatcaagcatgtgaaagcagggagtggccaaacccatcttgactgcgccggactaatcagctgttgtcgcaatgtatctagtcgtaccagagtgaccactgtgtcatgagggtacaatgggtgacaattacgagaggggatacccttgcacagccgaaatgactagtctcgaaatggcgatggcaaaacgctagacaatctgtctccattggcaaccaatcttcccaggcgctgccggtgacaggtatctacttgtcgtgttacacacctgtgttttatagatttagatttgagagctggtctacccgcaaaaaagagtcaaaagaggtatgccagtcggtttgtgctagctttgcccctacaggcataagaggcctgtcgtccagcagcgtgcttgcggtttcgcaaactgtaacatgattactgtatcaggagacccacgcgaggaattggacgatctgtgctcattggcaagaggtggaagagggatacggtccgacttgcctgactgactaggcggtgttgtatcactcgtcgtcggcgttcggtttcagcgaacagaggcggtccatgtgacacacgcgcggtcaaatccataggaaaacatgtcaggttacctaatttgatgacgaatctcgccgaagtctggccgtagattccatcgagacttgccgggtcggtcggtcactcatggcgttgcccgatcgaaaacagccctggaggcctcatttcatataaagaccagaaggtagagccttcaaaagtcgttcccctcgacaatgtagcagaggagagcgcagaggtttgctttacaaatacgaaatggcacatcgatacgatttcccacgcaaacccgtggctaacccaaaggctacggttcagggtgacaagtaccgtctgaccatcttgaccgaaggtgtactccgatacgaatgggcggaagacggccagtttgaagatcgagcgtcgacgtttgcgcttttccgggacttgcctgtccctcgtttcaaaaagaccgagacggacgactatgtcgagatcaccaccgacctcatgcagatctattacaacaaaaaggaattctccgcagcggggttcatggtgacttgcaagcaattcggatggggcgaagggaaatggtattacggagcgggattagacgagtataacctccgagggaccgctcggaccctggacaacgtggacgggcgctgcgaactcggcccgggtgtcatctcccacaacggttgggcagagctggacgattccaagtccctcttgttcgagcaagacggatggatcgccgaacggaagaaacccgtgatcggtaccaagagggaggacgtctacctttttgcgtatggtcatcgattcaaggaggccctcaaagcgttccatacgatcagcgggaaggaacctcttttgccgaggtacgcctttggcaattggtggagccggtaccacaaggtcagcctgtcgtcacaacatcgatgatgtccctagtagctcatatgaatgactcgacagtactcggccaaagaatatatcgagctgatggacaagttcaaggcggaaaaaattcccctgtcggtcggcgtcatcgacatggattggcacttggtcgaagaggtcgaaaagaaggatggccacggatggacaggcgagtcagactttttctcctccggtagggacaacatcacttaaccgagtgaatcacatccattgaaagaacaggttatacctggagcaaaacgctcttccccgaccccaaagacttcttgaaacagctccacgaccgggacctcaaggcgacccttaaccttcatccggcggacggggtaaggcatttcgaggacgcctatgtcgacatgtgtcaaacactgggaagggatcccgagagcaaggagccgatcccgttcgagcccgaaaacagaaagtttatggatgcgtactttgacattctccatcggaggctcgaggacgagggggtggacttttgggtaggtgatgatggggaatctttcccaactttatctctgactgaccttttatgccttttttcagtggatcgattggcagcaacgtttgggactggcagaaccgctctggatcttgaatcactaccattacctcgattcgtcgttgcacggtaaacgccccatcagcttctcgcgatacgccggacccggtagtcatcgataccccgtcggattcagtggcgacacggtcatctcgtgggagtctctagactttcaaccggaattcaccgcgaccgccagcaacatcggtttcggcctatggtcccacgatatcggcggccactttttcggatccaagaatgacgagctgtacacccgttggattcagttgggtgtatggtcccctattctcaggttacattcgagcttgaacccgtttttgaccaaggagccctgggtctttggggacgaagctcgtcgtctagcgaccaaggctttgaggttcaggcatcgcctcatcccgtacctttacagcatgaaccgcgtagcgaacaaggagggggagcctttggtgcaacccatttactggtcctaccccgccgagaacccttgggaaatgaaagcagatccgaaagagctgggcaggcgtgcttacgggttcatgtacaagaatcaatttactttcggaaccgagttgatggtcgcgcctatcacctctccccggaattcgaggacgcttctgggacacgtcaaagcctggttgcctcccggtacttgggtcgatttcgacacaggactggtatacgacggagatcgagagactgtacttcaccgaagtctcgacgactacccagtctttgctaggcccggatcgatcctgcccttggactcggccgaggatatcgaaaacggtggggtcgtgcccaaacagatcgaggtgattttggtcgttggcaagagcggacgattcgagatgcacgaggacgatggcgagggcgagtcgggcaaggagacatacacctcggccatcgaatacgactacgaatccggtctggtcaagatcactgatgctcaatcaaccctgcgcgaatcttggagcgtgcgtctactcggctactgggaccaagacgcggtcaagtcggccgaaggagttgaagtcaccaaggaggccaacgggctggttgtccgacttggatcccccaagctcgagcttcagcttcctgcccgagccgagctcggcgtcttggacccaaaaccattgatctaccagatcatcgacaagtctcagctcgagtttgaagtcaaacggaggatctgggtgacggtacaggacgacaagctacctttcaacgtcaagatcagcaggatcatgggggaagaccccgatccggaaaagtctctgggttcagctatcgtcgagctgtttacggcggaccaacggttggggcgtgcttgatggatgtgagacttcaggcgggaaacgccattgatggacatttctagctccagaacgtgactgactagagggtcagccaccccagatagtcatccctgtgtaccctacgtatcaaaccataacgataagcgactgtctccgcccaaatataggcagtacgctatgtaacacgacttggtttcctcccgcgactgcgtccaagcgagtctgcactacggcaactttcgactcgagactgcgctaaattcgacaataccctccctcgcttgaaccctgttttttacaaaatctcccttcgcagctcgttcagtggtttcgggcgtttgacgcgctcggacatggcttgcttgacaagattgggttgctggttcatccttcgctttctgcgcagggtggcatacgtcgtgtaaacgatcgggactgttctactctgccgccttgacttgcgataattgcgtctattccatcatcaccgtatcgattcctcgtgcgtacccgcgctaaatgaacgcctcgatcccttgtcgctttcacatgcccataatcctccgtctttccgcggccccccagctccagcacgaatgcaaaaccccgatgagaagggagaaaaagttccgaaaggctttgatcgaacgagtcgcaaggatgcctcggatgatcccgccggatcctcatcgcccccgcggttatagctttctgagcttctgcctcccctcacccgtcccacttcccttgcccgaccctttaaacataccttttccttgttcacgagggtcaccccccggacacgccagcaccgtccttgtggttccacgctaaatagaaacagcaccacgcttcatagcttgttcttcctctgtcacccactctcctaagcccatcatgtgagagatggaacaaccccgagccgaccaacatggaactcgtgtgcactagcctccgctctattctttcccatcatcgacgacctcgagaaaaagaaggaaagctggagaggttattccgttgcgatgcggtagcatgagaaattagagctccggttgggcgacctgtatgtataacgagaagttcatgatgatcgatgacgattagattatcaccgacgagaaggggaaaaaaggaagagaagggcgaactgactgacgtgggatgattaccttttggaccgactttttgaaaccgtccatcaccctgacgtagtatcagcgagatagcttataggcacgagctgagctcgaacacccttttaggacgaagccaacgttcagacttagtagagatccggctggattgaatgaggcaagaggacccctaaaatatagcgattgacagacggcctacgaaatatcgacatcaccttcacgccaaaagggttctatatcggcacggggaaacgagcggtgacgagccacttcggtcattacgaaccttgacgaactagacttcaagccgccatcaatcccgaaaaaggattgccaagagctaggcaagcgggcgaaggacaggctgacttctaccccgtgtttcagacgacatcgacgcgatcaatcaattgggacatcatcttttccttgcggcacaggcgggcgtcgggcgacaaccccatcaattctcaaacgccaagtcgcatcaccggacaagtcatcaagagatccccatcacccggtcatccgctcggctgaacgcaaggtttacggccagctgccctctggcctcttgtcaaccacctcgaccagtcctccagcacgagtgacttatagagctcgaggagaaagacccgaagtgactttacccttccgttcagttcggacaagcagcaagcagaaggatatcgattgaaaaggagggcctctttgtacaagacgatccacccaattccaattcactcgatcgctgtaccccactcacccaacgcgactcgggatcatcgtaaaggagggtcctttcgtgtttgcttgccatcacactgccatcaacgcatcatccgaacgacctttggtccggaagaggcaggaggagagagcgtacctcgccagcttgtcgggatcctcgtcggtgtcacctcgtccacgcacggaactgtcacttcgactggtcgcaatccacctcgttcaggtcgattcgatcgacccgaccgtgctccttaccctgaaatcgcgaaaggatacgatatcggggtcagtcgatataagaagagaagcgatcattccgacgacgactgttttcgagggtcgtgcgcaatttcagggttgacgacaacaagatcgcgcatcattatttcttcccatcatcaaaacatcgaccaacaaacatctccatcacaccattttcatcgacataacaaatacctacgaacgcaaaccgacggaatgagcttttacctctctggacctcccgttccaacggtctacgggaaagactcttccacgaccaaacgcaacgatcgtgatcaagcgcttctcggtcaaatcggacgtctcgcctcgagtccttctagcgagattcgacctagactagcttctgacgcaggaacaggagaaggatcgatacgttccggtagagctggatccatcgcgagcacacagaccgccagtacgacgagctacacggccagagcgttgcaagagcaacagcaactgatggccaaccgcatcatgatgagtgggagtagttgggattcggcagaggacgtgatcgtcagtctcaaattcctgcaaccgttcgtcaacgccggggagacggatgcgatggccatccagcttgatggcagtcgaccaggcacgacagcctcgggagttggtgatggtgattttgcattcactcattcgaaccctttcggaggttcagatgaaccgccaaagacggcatcctcgcacaccacctcggtcgtgtcgaaacgatcaatccgatcgactgcgtcggcgacgttgacggcgatggaatccgaggtgtacgggattttgcagacgtatatcgagaacaaattgaaaaagaaacgaggcggcaaggaaaagagactcgttgaggtgggaaagaagatcgacgtgctggaagacgaggtgagccgattgcgtaaatcatatgttgttgcgatcaacactaattctaattatgtatgccagtttccggactgcgcgacatatatcaaactcttcaagcgtgcccgagagctgaacggcttgcttccacgggagtctccgttgccgaccgagtcggctgcctcgacatatgacgacgacgagcatacgaggaacgccgtcgaccacgatcgcaatgaaacttcggcctcctttatcgatccattcgattccctcacccgggccgctcctcggcacatgcatcgacacactacatccgcatcttcatctctttcgagacaagtttctccagctcggtccgtctccctcaatgcttcaccccgaccaccagcgagaaagttgtccaagaagggtcaccaaagcaaaacctcgacaagctcgtattctagccagtcaagcttctcacccagcattaccgccgatgacatttttgtcaatttcggttcgaacgaagtggacccggcttcgacatcaagtacagcgaccgccggtgtcaaggcgggtagaaggccgagtatggccttgttcactacatttggcaacaaccacaagaagagaggagacgatccggaagaatttggatggaaaggtcgttccaagggcatggacgaagcagagatcagctggcccctgccaagcccaacgacgggcggcaggatgacgagcgatcagcaacaggcagagatggtaaaggcaaagatcgccgaggcgttcttagagggcgcaccagggcacagagagaggaaggtgtcgaccctcgaaagcaccgcgtcgaatatggtaccgacgcgaccacctagaccttttatccctcgtacggtcccaggtggtcaagaagacagacacgaggacaagcgcatcgctggtctgactgacgtgcatcacatggacgccaaagacgatatcaatgtcagggacagcgcatcgtcgaaaggctccagcatatgcaagaccagcagtagaccaaccagtggttcgagctcgaccgtcgcgctgcgcaaggtcgctagcgcctcgaccattcgaattgatcagcctgccatcgtcaccgatacttttgaagccgatattttcggcacctcgcccgaacgagccagtgtgtcgattttcgacttgaaaagggattcaaagcgcttcgacgtcagatccgttcgtcctgcgaacatgaatacgacttcctcggcgcccccgccaagaatgcctttacctgccattcctgacaatgataccgccgacaagcttgcgctcgctcgttcgaggtccaactcgacctcttccacgcagagccaagcgaaacggcaagctgtgttcgtttccgacgagaccgatttcacgcatatcgacaacgatatcgaagagctccaatcgtccgagtcttccagcatatccgacgattcgatcgattcaggacgaaaaccgaggtcagcagaagagatcatgtcagccttacaagccagaacgtcggggattgccttgcccggcacatccgccaaagagccacctagacctgcgctgcttcctccgaaacattcatcttggagccgtgcatccgctgggcgcctttgcgatctccccgaggagggggaggagcttgaggacagttcgccgcggagtcaaaagagggcttacaatctggaggataccactgcatctcccgcattgtccaccagtggtaaccggtattcgaccgactcttatgacctcaagattacaactccagagggcgacatgatgtttcagtcggaataccgacgtgactttgacgttgagctcgggacgggcttgactcagagtcacctggaacaagagctgttctttcgagcgccggccgccaaaagagacatcgatgcgatacagaccaattgcaagtaaaggtgatacctaaattgtatggaaacgaggaataaaggtccaccgtgtatgagtagtcacgaagggaatataatgatcgaatgcagaatgtggactccgacaagagacgatattgatcatcttgcaccggtcttgtttgaacaagggccgctgttagggccagtcgagacggcaccgttcttgttgaaaccagttgagatggcaatggtcttgttagaaccagtcgagatggcaatggtcttgttagaaccagtcgagatggcaatggtcttgttagaaccagtggaaacgggatggatctcgttgccagttttcccctggacgacagcggagtaggtggcagaagcggtggtagaagtggaagacatgtttgtataggtagtgggtgaggtttacgtgggatagggtatgtaaagggtgttgactaagtccaatgcgatacatgaggtttcgtgtgtgtggctacatgatgatggactggtcgagagagatgctagagaattaagagataacactgcagattataatcattcgaaaaaatgtccgcgatcatccgggattgccggtgatcgaagtgagacccttgatactgctgaagaacctgacacttcggcgtcttttgggctgattaggcttcgtaccatcgatatcgcgaccttgatctggacgacgatccgctgcttccgccttcgaggtcgaggaagtgtctgtgccgtattctgacgacgcgttcgaccgccttccatggtgagtgactgcttgactggcgggtgccccaaaatcgtcgacgatcggcaacgccggtagctcgctgggggaaccgggtacggattccagaccacgaggatctccagaaggggtcgagtaaacggaagaggccagggggtccgtatcgacagaattccttctactgtcatatccgccacattcgctattagggttcgaattgatgccctttcccttcgaagccaacttgacgaaggacatggacctcgtcatgaacgatgtcgattgagtcggttggcctggtcgaacattcgagaacccggcgcctgacgcatatatgccgttgtgatgcgtcgcatcgaagtatcccccggtcgctatatctcggtcgttcggagtcgtgtcatcgtctaccccaacatcaggcaacctcggcaccgacgggctgctcgggagggagtacgccctctccgtcttgggacgaccgaaaagagagctgagtcgagttagggattgcttgcgaggcaaagcttggcggtcgaccggagctgggacagaggtgagctggctcgggagtccctgagatcgcgaacgaacatggcgatatccagaaacgtcatctcgtgacgcagcggctcgtggcttctcggtcgaggtcgttaaagtgtacggcaacgcagaagcagtcatgttgacagggcttgtcggcactgccagaggcgtatgggataccacaggcgaggaaagcgtggtaccgctgatcagcataggagtcgatgcccagggatcttgtccgtcgtgggaagacagcgaaagaccccgcttgatgctacccgccagtgaggaccgtttgctagacaccgtcgcatatgacatgcgattatcctccttttgactgctagtagagaccgtgcgcgtgtgaccgagcccattgaagtcaacataacttcgacgacgctttaagacggacgaatcccgcatagacaaccgattgcgaatcggtccagagcccgttccgggagaaggcatggtctttgattgctcgctgctcatcctggccaagctgatttcttcactaaagatgagatagtcgtcgatgactgcgcgatgccagggcgaagctcgtcttagaaggatgctctgtggtgtgccacccgacattaccatttgtcgatggagcggggtggcaggtgtgactggcgacgttggaaagggaacgtcgtcctgatgctccgacgcttctccgcgagcggccgagcggccgagcggtgtagagggcgtagcgtctgccggttcgtatagcgccaaggagttcctctttaccggagaggtcatcatttccgccggattcaataccgattcgcggcgactcttgttggaacgcagcaacacgctacagggcaaatcgaacggtagtactcccgcttcatcgcgagcagcacacaaagctgccgcccaaacgtctttttcctgttgacaggttgtagcaagctcgaactgatgatccagaaagatgagtctgattgaataaggcagaaatcctaaagacgagactgatgagctccttgaaatgtgttcgctccatcacgtctgccctcaccttcggtcacatcgatcaattcgaacatttccaagggaaggaaatgtttgatctcgtagctcgtcttcttggccttgaccaagagcatgaagccgttgtagacgaaagctccgtaatacttgacgcgtaggggtggatgcaatggcgccaagctgtggtgatgatacaaaacatccaatgctccagccagcacgcaagggccaagacccgccaagagcgtctttgtgacaacctgggtcatgaaaagcagacgttagtactgccatcacggaaaacatcaaacgcggtcgattgagaactcacaggatgatattctagacgctttgcaatgttctttgtcctagagatcctgatactccgacgattcgcttcgtctgcccggctagccgccatcttggccactgcaagagcccgggcagggtcgacaccgacatcgtagctcctggtaaaatcaatcttgtcttcaagggccggggatggggtacctccgctcacactgagcgaatgcagcacgagcgggtaacggcagatgcgctgtaccggcaagatgagcaagtctcgaaggtataatcgagaaggcatcgaactgagagtggccggtggaacggacgtagagacaaagctcggattctcttctctaagcatgctgtagaggtccttgtgcaccctcgttgccgctacgatacgacaccgtttttcgaaagagtgccattccggtcggtgatgaacggcacgaatgatgtccatcgcagcagcggtaccagcgcagtattgattataaatctcgagtccggatgcctggaagaagtgagagtgagtttacatgttcggttcacactgtaccacgcgatctcacatcttcgatgaaaacggcagacaccttgcgtatcattctctccgtccttgcaggttcatccaccggtgtgggcagatctgcttccgtgcccaaatgctcttccttgaggacctcgaccatgcgagctgaaaactggtcgtgaaagtaaagcatgtctccaagattgcgggaaatggccttgtgatcagactcggtaatgcaagatagtgcagcgagttgaggcaaaaagatctcgacgaggtcacgcaagtgactggtgtaagcgacctcggtctcgaccaactcgaccagctgatatttcctccgatcggaacgagcgacgcgaacggcaagtcggtcacgcagagctttggtgagatcgtgcatatcgacagatggatctgccggattaacgatgaggggttgttccttgtccgcgccttcctttgcgttcttggtacttctcgacagcgacgtcgaagcggacgagagcatgacctcggcagtgcccgcgccagacgacgtgcccgtcagggacggcatctgatcgtgatcttcctcgaagctattgccgccgacattttccctagactcggcctcgggttgcgtagtctcgcctgattgattcagcgggggccgttccgcccgaagcgtaaacgaaggcagaccctcgtcgtccagcccaagaacgctcgatcccgcgacgggtttgctcgtgaaaaagtcgtctcctgagcgatgagtctgcgatttgctatgactgctcggcgcaggcgagaccaaaggtcgaccttgcccagtaaggccacccgggatggcatgaagagtgtagttgacatcggatcctggaacatagacgaacggctgcgtggctggtttttcggtcgtcttgtgatccggggtcgaccacttgataggggatttttttggccgcgtatcgaccttcaggctggacgtccgccgcggcaccgtgatccgctcagctgaaggaggctcacctctgccccaaacctgacgtcgaccatcgacgggcgaaaggtggaagaagtcggattgtctcgccgggtcgatcgccggcatggctcccggcggtagttgacctcgtttcaattcgtcccccaacgtcccaaagacaaactcttgaggattgttgctcaccgtggccctgcgtttccgctgcgacgctgacgcggtcgccaaatattggccttgtagtcccgcgacgaatgtgtctctgccccatgtatgtgccaaagggttctcaccgaccgaatcactccgatgactggcagagggtaacacgtgaagcgagggcgagcgccgcttgtacctagacgtcgtgatcggatggccctgcccatgtcctcgatccgagaccgaatacccagcgatccccgcgttcgatgacaatctcctcctgcctttcgatttgccctgaatcgcctcggccgatcgcggactagcctgccacctcgtaggcgtatccaattcgtcgtcgtccgtggtcaacgagctagtccggcccgatatgacggggtaagaggagaatacaggctgatcggggatgatcaagggcgaaacgatcggtcgagtccggctcgtcgtcgtcgcggccgagtttggtcggcctggtcgaccctgtacatgtacttgcgcttgaccctggacttgctgtgtcggtcgcgttggggtggaaagcccactcctgggatccgagtccgagccgttcgttgccgaagtcgagttgtaccctcccgaaccagaatcatgagccgagtgacccgacaaggagctcgtgctcggtctcgacccggaagccacggggaagacgggtggaccgagcatgaactgggtatcgccgtgatgcgcccagcccgtccatcgatcgtcctctgctgaaccggctccaggaccgactcccggtactccagcccctgcatccctgctcttgcgtctcaaagaataatgcgcaggccctgaattcgaatccacctgagttccgagtaaaagctgtacggtggacatgttggccctcgagtttagttctagtcccaaagtcggttcgaccgggccgagagtggagagtacgttcgcatgtccgtcgcccgaagagctagaaacgctaagtctgcgaagcttgtagtgcgaccctgacgccgaccccgaacctgacgccgttgccgacgagctcggtccagggcctgatcccagcccgaaattcgatgtctgaattacggaggaagctcctaacccggcttgtccaccgagactagctctcctcgtcgacatcgacatcgacgaaggtgagatcgagagtcctaaacccgatcccttctcgaaccccggtgcagcgagttctaattcctgtaccgtcaacgggagatgaagctgtgaaggggacaccgttaccgagtatggcgacctatgactggtttgcgaaccagaagccgaacccgagttggacgctcttctccctgatccgagactcggggagatgatctccagcgcatgatcgacggaccacctcctcgggctcttcttgctcgtcgtcgttgtcgtcaggttgggcgagttccctcccacccgttcgactcctgccccggtcgacccggtgtaaacatcatgcccatcatccgaatatcgctgtagtcgttcttggttgccggtagaatggaggtggaacatgtaatccctgtagagctggtaagaagggtgttcgagctccaagtctgagggagagatgcgttgcatgatccggatccaaagctagatccgtgtgagtgtatcgatgatgatgattatagtcgtgtatacttccgtatgttgctggccttcctgttcgattgcttatgtgatgaatctgagttgtgaactcgtgggatgctcagaggacgacctgcttgttgatgctcgtcccgccgctaattccaggctgtgcgctcgctagagctagtccagatcgtctttcctgacaaaagtctaggtattgctatctgctcgtagacttgcacgaatcgagaccacggacgtctgcttggttcaagaatgtcgagtcgccgatcacccagctctggctgaccgcatggtctttctagatcgacatgatcatccgctcggtgtccgactgagataagagtttgcgtatgtccgggtcgacaggacgtaggaaaaggtctcgaagtgataaaagtgtggggtatcactggcccgtgaacaaggcgatcgagagggtcagatgtgacgggcgattgcgaacttggcgattttgacctggatcgatttcctcatattcgcatgcatgttccgtccggacttggtcaacacatgcaagttctcgcttgctctgctcggaacggaatggaatcaagctcgcccctcgccctcgtttcgacgcctctttactgcgctctctcgccccctgtgcggcggcagcgtcagaggtgtataagaggcagggtaagggcaggcgcgagaggggggaatgggggggggatcgcatgggcaaaggtcgaaagatggaagagtcagagagagagagagagagagagagagaattatatacagactcaccacctccaagcacccccgagcacaccgcaccggggtgatcaagctcttccacaacacacactcccttgcacaagaaagaatatcacgagtgatccagggtctgtacaggagctactcacaaatcggtaccgtcaaggtcctccaggtgaatgcgcgattgcatcacgagcctcgaatcgatatgctcctagtcgcacgacgctgacgacgtcctcctcccgtcttaccaggtctcacagattgaacacgaggacgctcttttagcgactcagtagaacagctcaaaagcgcatttgcgggctgccgacgagccatgcctcgctactctgccgtcccaacggacgagccgacgtcggtcaataaccatcccctcggaacctcgctcaaagagtattcccgcaagatcgtcaaatgggtgtacatctttgatctcatccgtgccgccatcatggtaggcctcacagggctcaacattgatgcgacaatcatctccaagctcagggtagggaacgggggaagcgagtcgatcgtaggcgggttgatggtcgccctggtgaaacagcatggcttgagccacatgcaaaaggtcgagctgggcgtcaccatcttctacgtgagtcgagcgccggtcgttccgtgtcccgaatcgtcgtttgctcacgacggtttcgcttcaggccgccaacctggtactcgccgtcggcatcgccgccatgcgtaaagactcgcccttgcgccgtaccatccaattcatcttccacaccctcatgctcgtcgcctggaccgtctattcataccgggacctctaccctctgatcacctactctaaacaccctctggaccccgaattcctgcctcaacccgttgtctggacacgattctccttgctcacaatcgtcgccgtcgtcatccccctgcttcaaccgagccaataccgacccgtcgacccgatgcacccgagcgacgagcccaactcggaacaaacggccagtctgttctcgtacgtcttttactttttcatggacaagatcatcctccaagcctggaggtccaacgccatcccttacgaagaattgccgcccctcccggattatgaccgggcgagctggttggccaagaacaacctgttgaagctccaccctgtgaggagacaagagctcgggttgaaatctcgacacttgttcgtctgcctcatgtccgtctactggaagacgtacggcatgctcgccctcatgctcctcatcaaggccatgatggagtttgccgcaccgatcggtatcaaccgattgttgacctatctgcaggacggggataacaagggaggagacgtcagaccctggttctggatcctgtggttgttcttgggaccgacgttctcgagcttggcttggcagtactacgtcttcctgaccacgagatcgttggtacacgtggaatccctcttcacgcagctcttgttcgggcacgcgttgaggatcaagatgcaggaccccgtggatcagacgtctaccactaagaacggaaacgcgccggttcagggggctaacaccccagcggtcgttgcggatgatgcgcccgggttgagcaacacgtcgatcccgatcgtcaacaatgatacggctgccgtgcatgccgtcgatggcggttcgagcgaagacgagagcagcgtgcctagtaacaagagggaaggtagcgtcgagggctcgaacaagggaaaggacggaaccagcgctaccgcctcggatgaacctcagacggctgggctcgtggggagactgacgacgctcgccagttccgatttggagaacattatcgagggcagggatttcctgatggccatcctctatgctcccctgcagctcatcctcggagccatctttttgtaccagatcctctcctggtccgcgctcgtcggaatggctgtcaccctggtcacgctgcccatcccgggatacctcgccaagctcatgaacactacccagcaagacctgatgaaagcgacggacagtcgaattcagaccatcaccgaggccgtcaacacgttgaggatggtcaaactctttgcgtgggaggaaaagatttcggaacggatctcggagaaacgagcggccgagatgcgacaggtcagacgcaaggcgtttgtcgacaaggctatcagcacggtcaactttggtctgcccatctttaccatggtcgcctgttacggactctacacgggcgttcaaaagcgcaacttgtcggccgctcaggtgttttcctcgctctcggtattcgacatgatcaggggacagatgtaccaaatcaccagccagattcaggccaccatcgccgccaaagtctcggtcgagaggatggatcactttctcaggtcgaccgagatgctcgacgagtacaaggatgaagtcgtactcagcgtaaagtcgacggaagagcaggacgcgatctactttaagaatgcagagttttcgtgggagagcccgtcggtcaaggccaaggcggggaacctaaccaagaacaaggggaccgccacggccaagagggaatggaaattggtcatcgacgacctcgagtttcctcgaggcaaaactacggtcgtcgcgggaaagacttcttcaggaaagacgagcttgctcatggccctcttgggagagatgaactggacgccaactcgattggacgcttccttcaacctgcctcgtgcgagcggagtcgcgtatgccgctcaagaggcttgggtcatggcaagcactgtcagggaaaacatcgtctttggcgagactttcgatgcggataggtacaaaaaggtccttcacgcgtgtgctttagaaaaggatctggagctgttcgacgctggtgatcagaccgagctcggcgaaaagggtctcaatgccaggtgagtgaatcgttgcggctcttccagagctggccgctgaccatctacttgatgctgttttcgcagtggtggacaaaaggctcgaatcagtctcgctcgtgccgtgtactcggacgccaagattctcctcctcgactctgtcctcgaggctctggacgtgaccacctcgcgatggatcgtcgagaaactctttggaggcgatttgctcaaagacaggacggtcattctcgttacccaccacgtcgctctgctcgcgcccgttactgattggatcgtgcacatggctgtcgggggtaccattgatcatcaaggcccgatcgaccagatgcagcagcttatcgaagacgaggctgccagcgagatcggacctgaacacgtagaagagcccgtctctgaagctcaccaggcggaaaagcctgcggccgtcatcgtggacgctgccagcagcggagaagacgctgaggccggcaaactcgtctcggtcgaggaaaagggcgaaggccgagtctcgcgatcggcattgattgcatttttcaggttggcaggaggacctatctactggtcgatctatttcaccatcatcgtcattggcgagatcctctacgctgtttgcaactggtggctcggtgaatggtcccgcgcatacgacgagactgacgaccctcgcaaggtgtccatcctctactggctgggcatgtatgttctgctcatgttcgtccaactcggttgctacaactcgagcagtctccagtggatgttcggggcaatccgagcgtcgacgaaattacacgccaacctcgtgcaccatattcttcgcgctcccatgcgcttcctcgacaagacgcctaccggacgtatcctcggccgattcacaaaggacatgaactcgatcgattcttcggtcgtcgatctgttccaaggcttgagtgagatcaccatcaccttggcgctcaaggctctcatcttggtctggctcgtaccgatctttggtcccgtcggactcgtcatcgccctcctcggattcggtttggccgagctgtacattcacggacaactctcggtcaagcgggaaatgtcaaacgccaagactcctctgtacacgtcgttcaacgctgccgtcaacggtgtcatctcgattcgagcttatggcgctcaagagttctttgccaccgagctgagggctcgatgtgacaagtacacgagatgctgcgtgacgtattacaacttgaaccggtatgccgcgacgtgctgcgtgccttgatcaatcgagagctgacacctcgtcgtctcatcttcttcagatggatcactgtccgcatggacctcctcggaggattgttcagctcgggactcgccgcgcttttggtctataatggtagcggcatccttcccgcttcggatgtcggtttcgccctgaaccaagccgtcagcttcagtgccattctgctctactttgtgcgaatggtcaaccagttcgaggtccaggccaacggtatcgagaggatcaacgattacttgcaaattgaccaagagcccgcttcaactgaagaaggcaaacctcccgcgtcttggcccgagaccggagacattcgggttgagaacctgaacgcccgatactttgaaggcggtcctcttgtgctcaaagacctatcattcgacgtccctgccggatctcgtatcggtatcgtcggccggactggaagtggaaagagcagtctgaccttggccctgctgcgaatgattccgaccgaaggatcgatcaagatcgccggactcgactcgaaacgggtcaacctgaacgcgctccgtcgagccgtgacgatcatcccgcaagaccctgttctcctgtccggaacgttgaggttcaacctggacccgttcgacgagcacgatgactacgagttgaacgatgtcgtcaagacctctggcctggagatggccacaggcgaggtcgacgacgagtcttcgacttcggcattgactttggactcgaagattgcgagcggaggatccaacttgagtgcgggtcagaggtgagtcgtcgagggtgcattctcgctgggtctgtcggactagtttactcatagttgcgcttcatgacaggcaattggtcgcacttgcacgagctctcgtccgagggtcgagaatccttgtactcgatgaagcgacaggtacgttccatgagttggccatgtctacgcgtctcgatcctgattttcaaattcgccgtcttttcagcctcggtcgaccacgctaccgacgcactcgtccagaccgcgatccgcaatctcaaagatgtaacccttttgattgttgcccacaggctgacgacgatcggcgactcggaccgtatcctcgtattgagttctgggacaatgatggagtacgacacgccaaaagtcctcttgcagaacacccagggccactaccacgcgctgtgcaacgacagccacgaaaaggagcagctctacgcactcgccgatggcgcagccaggacatagcttgaagatcgccgtgatgtacagacagctctagattccgctgtcgccgtgtccatggcatcatattagatgtttcattcaaccagattttaaccagtgaggtccggtgtccagaggtctgactgactatcactgcacgaaaaggcgctctgctgcgagatcccttgtacctccgtaaagaagcgacaacgtgcacatgacggtggttgcatgtgtataaacaaagaagaaattgcatacacgaagagatggatcattacaaaagtataccacgtctcagaacagacccttgctgagcagaactagtcttgacgaacacgcttgctcgaggacgcgctgaaaaattcatcataatgatcagtcacacatggccaaacccggtcagcatgaaacggttgcaggcgtcgacactcaccccgaggtgtccagcccacgcttctttccggcaacggcatcccccataaactggttgagcccgaacggatcctgttgtccgtccataccctggacctgtcccatgctaagactgacatccttttcaaactcgaccggtcctgaccggtcctctttgccggcctcggcggctccgacgaatttggacgctccgagcccgaacctgtcgttttcgagcgcgttcgagatgccctcttcggtaccccctccaaaggcctcgtcgttccggttgttcccacggggacggtagatggcagcagcggcggtggtagcgttgaagagcggcttgtcgtagacgttgtaagaaccggtatctcccgtgctggccgagttggcttcccggttgaacaatcgcgagtcgtacatgctctccttcgacgttgtaggtttggccagaccgagtgcgatcttttcggaaatgtctcggttttgttccctacagtgaggacgcggacaagggtcagtttgacgtctcgaagtcaggtctctttatacgacgacctgaagactcacttcatcaacatcttggccctctgctccgaccccatattgttcagcctcatctccctctcacgttcctgcctcttttccctcctgatcttttcacgctccttggcggcctcgtcatcggtatcgtcgtccgactcgtcctcgctctcgctcctcgccgccgtcgactttctaacgggcttgtcgctagcatcggaatcggcatcggaatcgctatcagacccgtaccctgccaacccgacgccacgctcgaccggtttcgactcggcggcaccggcgctggtgctggtgatccccgcccgctcctccctcgcccgctgagccaaaagacgaaggttttcctccttggcggccttttccttttgagcgagtcgttgttgcatcaaagcccgttcccggacctcttcacgcgcgtgtcggtccgcgatgtacagggcttcggagaatttggcgaaattgtcattgatatggatctgtacggggaaggttcaggtggacgaagcgatatgatcggatcagtttggaattcggttagcctgaaccctctctttaacgctgactgaacgatcccacgcgtcgagagactcacatcctgcaaccctcgaccgtcagcggcgagacgcttatccagagggatcgtgtaccccttgttgttcttccaattactgatacacggggggatctgccaatccttttgttcctgcaccgtcgccctcctcggcggactctgcatgacgggtggaggtggctcgtcgtttgccctagggatcttcttgtgcttgaacctagggggttcgagcggatcctcggcgacggtagacattttgatgatccgttgtttcccctcgtccgacgtcgaggccggggtgtaacggatgtactcggacgaggcattgtccttgatcgtcagcgtggaaggacgagcggcggcgatcttgcccgaggtgatggattcgagagcgagacgggtacgttcggcagtggacatgacggcggattcagaaggtcgttcgagggacttgtctttgagctcgtcacgtttcgccagaggcaccaggtctgcatcgcgtcaccgtcgtggtcgtcagccaggtgccacgtcacgacggactgaatcgcaattgaggtgcgataggtgaaactcacctcgagcactgctatgcaccgtctgaccctctttacgaccgtactgggcgatcgcgtcgtacctcacgtttccctgcgcgtccacctggagtgccaaggtaccgcccgtgtttccctgcaaatcgacgacgaaacgagcccccgccaatcagtgcgtaattcacacgggcaaagatctgatggcaggatggcaagacggacctttttccttcccatatccaggggatactgagcgacccagcattcggggaaagctccaccatcgttgaagtcatcgtccgatttgggcttccatcccttcctcttgccgtacgccggaatatgggaacctcgtttaggcagcaaggagaggtccggggtggagcttgaccctgagggagagtcattgtatgatgagatgggattgtgcaagggagcgggaagagagctgtacgtgaggaggcgatgagatcagtcgttgtcccgtcaatgccccgggtcgaatggggctgagactgttcttaccgagcgagggcggccatatttgcaaccgttgtggtctgtcaagtttagtgatgatctagtggccgtcgatctgaactgatcgcgatgtgatgcgatgcaagataggggatatcgaccactacgatttgatggtgtatcctaaactagaaggcgaggtggctaatgagccatgtttcggatccgagggagagttggatgactaagcgcgcttaagacacgatagcagaagatgcgcttctaatttgctgccgtgatccatgctggtcattgacctgttagatttgcctccgaacccttcaccttgcgtaatttacgttatttcctattttcgcgtggaaaacagattccggatccgagggggaaccacagccagcctcgacccaaagagcgaggtaagtacatcatatcttccacatctacatccacatcaacgtaggtagtatagacaatatacgcaggctgttattgcgattatctgcacaaacaccaacacgatgtctagtgaatcagctgtgtgtaacagatctcccactggaccgcccatgctgacccgcctgtcttcccgtccagatccctttgcagacacgcacaacgcgcgacctcaagcgctcgatgataacccctttgcggacacctcagaccccatcaacccgttctccaacccgtcaaacaacgcctcgtccttttccctcgaatcccagaccacacccgttcccggtggaagacacggacagggagggtttcaagctcagcaggacgacgctgggtaccgcgcaagggaggaggaactgaggagacgggacgaggaggttcagaggagacagagagagttggatgagagggaacgtaggttggatgcgggggagggcaaggcaaactggccgttctgtgagtactatcgcgggttgttctccaacccccctcccgacgtctcccgtacgagctctcggctcgatggctaacccctacctacccgccagtcttcccgatgatccgccacgaaatcaaagatctacccagtacacaccaatccaccatgacccaactgtacatccaatggttaggtttgctcgtcaccctgatcatcaacctcgtcgcgtgcatcttgttgttgatcgccgggagctcggatggagggtgagtccctgggcggcaaagtatgcagtcataggtagaagctaatcccgctttgcttgaacttttgccttgcacctcgtcgactcgaatcgacacgactcggtcaccattcgtatccattcccacccggactcgcccccgcagtaaagacacggccgcagcagggtcttatacgtttgtcatcaccgtcacgtcgttcttcctctggtaccgacccatctacctgggttataagaaggagggcgggttagcgttgttcttctgtaagtccccggtcgagttcgaggtcgtgtaggagagctgacctggatcgtcgtcgtcggtggggcatgaatgaacgaccgaacggacagacctgtactttttcttcggaggttggcacttgttgttctcgctctagtaagtcctcttgcgctcgaggtcgagagtggtcagaagtagcgagtggctcatgcaggctcctcatttgacgattagcatgctcatcgggatcccatgtacgtccgacgtccaagagtacccaatcggccatgctatcaccgcccctgctgacccgcgcccctccgaccccacagcgaccggctcggcaggtctgatcaacaccatctcgatgctctcccagggccacgtcctctcgggcgtgtttggcgtcatcacctcggtcggatggaccgtacagaccttgttcggcggatggttgtacaaacgggtatgggactttaagaataacaacgaggggatcagtttccagaacgtgagtcggacgagtcttgggctgatggcaaaggggatgtggcgtgtactgattgggggaacgtatcgcatcgcattgcatcgcatcgttcctcttgataggcgaccaaccagttcaaggcggaatcgttcaagaccgtcgtcctccatcaatccaggatctaagcgcgacgaccgaccaggacgcaagacgatcacagaggtgcgggtacggtcacagtcgacgtcgcaactgatccggtccggttggtcgttgtcagcatcatcgatctggttccggtcgacacgaacatatgtagggccagacagggttgttcgagcttgcgggttggctgcaagtcgaccatggaacatgtaccgagaaagataggatgcggatatgccatattatagatgatctgatcaatctacggcttgcgactgctagctacatctaccgacgctacagatgtacgatctagaatgacgaatctacgttgttggtgaaatgtctgctccagccagcgaagtcttgaggggtctcgtgtacggccgtcctccccgcccccggcgtctctctccccccgaagagggaaatcgacacggacgacgagcaaagacgaccaggcggagttggttataccccccgcacgaccgcatggctccgtttctcacggttcagagcacccggacccaacgaaaggtcttcctcttacaaaagacacggtatcagagggtcccatgggggaaaaggtgtcgcatgctcgatcccgcgcggtagaggcgtggggcgggcaaaacaggcgagatgacaacccccgccctctcccgaaagagagggaagggggaggcatgatgaagggtagaccgccaagacggggtctacccgaccgactcggtcctggccggttacgtctagcgacgtgccccttcctatgaacccaccggaggaccgtcctactcccaccctctaccggctcagaaagagatggccgagggctccctcgatcctttctcaagagaaagggacggggacgggagcgggatgatgaacgacgaggtttcgttcttccacagttttgactcatacatctgctcatcaataacgcacgtcgacgctcgaaagcatcgacgggtcgacccgccgtttggttagggagtgcgggtagttagaggtccggaccggtaaaggcaggacggcaactacccaccctcccaggtgaaacgggagttctagcaggggatctaaggaccgtggtgttaaggttttggttatccagccagctccacgggtgttattggtaggtcgatgggtgggtggcgcgtttgtcatactcgaggtcatggtgatgctcttgatggcatggcgaccgtcgctcggaggacccgggtgtgagccttgatccgaccgggagtgtgggtcgggtcgaggtacggttggataggtccgagcggttagggtttatgccagcgtgtgtgtgtcagagggagttgatggatagtgaggtggaagtcggggtcgatgtggagtgggtgggatgtttttgatggaaagttttggcttgcttgcttgcttttatgcttgtcggggttgaaatatttggtgtgagagaggaaattagtgaaacccaatttattgggtcgatcagcgaaagtaccagcgtagtacctgttgatctgatgaagcttcaaatactcgcgtggaccaccaggttgacctcaaaagtacctgcctgcctgcctgcctgcctgcctgcctactaatctctgctcgcttactgcggggactccttcctctttgagtcgcgattcgggtggtggtgatttctcggagatggccgatccgcgggtcatcgttgctgctgctgctgtgccatatgccgtacactactagctgtgccgtgatggtgactttgctacttttcccacgcgtttccccgcccccccttgctcgcttcgtcattccctgatcgagcgagaccccgaccatcgccacctcagtcgagggtaggtaggtgtgtgtacacccggatcaggtcataaccccatcatcacatcgacataccttccacatcacacataccctttcactcttcagctcatatttgtgtatcacttacacaatcaagagcacacaaacacacaaccactctcatccaactcccatcatgaagtccgctctctacctgaccgcggcgctcgccgtcgcttcaggcgctcaagccggagtacaccggtgagttccatcatcgccttcgcctcctcccccccttccccccacacctccctttgacccgatttcgtttcgccgaattcctcctcactcttactgatcatgaccgactcccccgccgcggcgactaccagcatgaagctcaacaagatcgaaaccaaggacgccgtctccctgaccaaaccctcgtacgccatcccccccgagctcgaggccgcctggttgggatacaaacactcgatcgaaaaggtcaagggtagcaaggaggagcatgaggccttttggaggaccgtggtggacgaggtcgaggccgggttggagggtctgaaaccgtggaagaggagcgtcgacgagggagagatgatcgctcagcgtggacatggagtgcctttgagtggtaagccggtgtcgtcgtcgtcatatgcacttcgttacaaaccctgacgactctcctctcctcctcaccccctcggtgccttgtcgaccccaaacagattactcgaacttgcaatactacgccccgatcaccctaggtaacccgccccagccgttcaaggtcgtactcgataccgggtcttccaacttgtgggtcccgggcaaagcttgttccagtatcgcttgtttcgtgagtatacccacatacatgcgcgcccgctcggtatcgtcccgcacgcatcgctgaccctgaatccaacgtttgacgtttgatgtttgaccctgttctttgtcgaccccccccgcccggaccgttacgcagctccacgccaagtacgattcggccgcgtccaagacttacaagccgaacgggaccgaattcgccattcaatacggatccggcagcgtcgaagggttcatctccaaggacgacctcgggatcgccgatctcgtcgtcaagaaccagttgtttgccgagacgaccaaggaaccgggcttggcgttcgctttcggcaaattcgacgggatcctaggattggcctatgataacctcgccgtcaacaagatcccgccccccttttacaacatgatcgatcagaaattgttggacgaacccgtcttctccttcaggctcggttcgtccgaagaggacggcggcgagtgcatctttggagggatcgacaaggacgcgttcgagggcaagttggattacgtccctctcaggagaaagggatactgggaggtcgagctcgaaaagatctcgtttggcgacgagacgctcgagttggaggggaccggcgcggccattgatacgggtaccagtttgatcgtcatgcccagcgatatcgccgagttgttgcacaagcagtgagtctcgccccacccccacccgtcgacgaggtcggaccgagtgactgatcagacttgcgtcctacgctcccgttttgcaggatcggcgcgactaaatcttggaacggtcaatacaccgtcgactgtgccaccgtcgactcgctccccgatttctcgttgaccttcaacgacaagaagtacacgctcaagggtagcgagtacattttgaacgcgggtgggacgtgcatctcgtcctttaccgggatggacattcccgcgcccgtcgggcctctctggatcgtcggggatacctttttgaggaagttctacacggtctacgatctcggcaagagtgagtcgcacgagtcccccttgcaatgtgagaggatgtcggctgatcgattcgtgtatagacgctgtcgggttcgcaaaggccaagtagaggacgtctcatacccgttgttccaagtacacggtttctactcgaacgcacacacgcacacgcacacacgtaacactcataccccctcgtctcgccttgtccgccgtctacagatggaacgagacgccgactagggttttcaatactctctcccctactcgaccgcattagtgtcgtttcttttccgatccctagtcaaccgagatcgtagcatcgaccgggaccattttgtcatgtgaatgaattttgaatgtgaaatatacaagagaaatcaggattgtcattactatgatcatcatcgttgttggtcttggtcagagaatgaccttggcctgggggcgacgcgtatcctgttgacccaagcaaaaggtggaggtcaactatcctcggccgggctcacaaagttggtcgatcgaccgagggaggtaccggttcagatttcgaaagttatatacacgcgaagtataagactgtaccggcgagcagttattaagactaagaaagatcagacacaagtcatcaagtgagtagctatgcaaaagaccccgaggtccatgctcagcgtctacccaggctgatacctcccggacggatcgcccccatcgtcgccgcagctcgccctcgcaaaccccgactttgacaaccgtcgcactccccacaatgtcgagctctgaagacgaatacgacccggctggtgccctggacgatatcgagtccacgctcgacacgcttgaagacctcctcggacccctcttgagcggcaagatgacgtgggacgagttgatggaaaaggaatcggcggatcatatgggtagggcaaagttgaacatgatgatggcctttggggtgtgtgacctcttattcggtgagtccagctcgggcccggaaatctcagcctggtggatcaggggatcgactgacgaggaggaattgcccgcccgattcagtgtatttacaaatgaagggacatgatacgacggatcatccggtcatgctcgagctggtgagctgctgtttcctgaaccgcctcgaaggctgccggggacgaaattgcgactgaccggatggatggaaattgtcgcctatagaaacggatcatggagtacaacgtcaagatcaaggaagccgagagtgcaccgaaacgtcagtccgagtcccccctcccataccagccccaacttccctcattccgtcctgaccctcatctatccacgtcgtcatacatctctgcacccgttcttcctcccatatagcccgcatgaaactggacaccgcagcagccggccggttcatccaagccgccatccccaaatcacaacgaaccccggcgatgactcccactctggcgaatggctcggggacgaatacacccgtaacaacgtcagcggtagggactgcagggaaaaaggagacgtatgaagaggtcgggatgagtagtcggttcaagcatttgggaggcgagggagaggttttggacttgtccgggtccgggtccgggtcgtagatggtctgcaagtggcccccgtggttaggggcattttggtcgtcaaagaggttgtaagcagagtctctagatgtattgtattactactgtatcataccctgatcgtcctgagatctccgagtctcacctggatgacacaagtggaaattcccaacagcgtcgccgaccctgaactggtgctggccgcaagagtttccgagctgttgctcgccatgacagtgtttgagctgttgctagcagtgatcgtaaaatcagattgtgaggtagtcatcgtggcgggcgtgtagttccaaagacagtagccgtagtagagaccaaggaccgctccgataaccgcagtcatgtcggatgaggatgagatctcggacattgtgtagcaactagtgtcagagagtggatgagaatgattgtgacaagatcagtgactagggtttacagagtatagtagcacttcaaagccagtagtagtgacagaaatgacctgaagaaaagatctcaagctcgataatcactacaacatgttcatgtgatagctacaaatgctgtttctgattctgatgccccttcagagcaggctgctttgttctgggcattcggtcgtggtcctatgggattcatcgcaagaattgttcgtctgcccagtcagaaccttcctgtcccagtaaagatgcaccgggaggcgcagcatcttttagtaaggttctgtttacaggaaatatccataccaggacgtctccacacctgacatgatcgacagtctttggattttcgacgattctaagcagaccgctggctgcgcgagctgcccagtcaggttgtctgacctatttcacgacggagtagcgagtaggtcatcgtaaaacgctttttgatcctcgttttgcttctctggatcttggcaagagatagtcctggaagcgcttctcgatgtccttgttcgttacggcgatggactcgttgcggctctccgctccgctgaacagagaaaccaaagctggtaccgtattcgtgtcgttgtggttgcggtgagaatatgtttcgaggttgagttttgacttgtcccgtttaggctcgtacgtgaagagagttagcacatctcgatctcgtcgttcgcgatctcttcgtcctggctagctggctggctggctgggggcgtctgccaacattcctttcgtgatgatcgacggtccgcggtctcgataatagtatgggacttgtagtatgtcacaaaaggtgataggattgtatatatagaccccctcgagtcggtcattcgtcgtgatgctctcctctggccatacctcgtctgtctgtaagccggatttgtgtccgtaagttgttccagccatggggacgaaacttgatcggtgtacgatgccattgaaatacagtaacggagatgtcgaccagatctaataccagaatctagcctcatggtagataattcggcgttgcttatcggtccacttaccctatttgtattgtctttagcacagcgcctggttccactaatgggagcctacttagtgacattacgtatgaagagcatgaaaaggtttccgcatttcctacctgcgcagtgagtaccgactaattgccagtccctagcagacccccgagatgcaggtcttcggctgaccaggccactataaatcccttatcgttctgacctcagtccagcaccgtcacgggtcgtaggtgcttgccgatagtcacggttaggctcaagctctcaaacacgagcatatcgtgtgtgatttgtcggtattgcagtggcgcgcctcaaaacgtcaagacttgaatgcgatcgggacgtgaaacgtttccgtgtagccagatacctgataatctcgagtaaatactcatttagagcaacacgatatctttttataattgtctctcacaataatagcgaagcaggacatacgtggaccccggttaaacgattaagtcacaatcaaaccggggaagggtttatgtgccgaagcagtacaagcctgtcagctcagtgccgcgctctatatgtattgtgattcagactacagacacgacgtcatacgcgtctgaacttcgcggccttcgctgtgacaaggtccattcatcctcacttcgtgtacacagtttccattgtgtggaccgtctgacaaggattccactctacttcttctgagaatctcccgagacgatctgcataagatccagacagaccgaagatctgattttaaggtggagtaactcttgataagcttgcagtcgcctctgatcgtccagaaaatcataattatcgttgcccgttcccaagagatcatcaaaagtcgctctaacagtcaatcccaataggctcaacactatgatgagcagttcgagaggttcataggcgactgggtcattctcctcagcttccctgttccatcgccaccaggtgcaatgtaagtatctcgggccgattttgccttgatccatgtcgatcaagtcaatcaaaggcttgtgctggagacatagacagatgttctgatattcaagcttctcgctgggccttcctgcctcttcgtaaaagtctccgtaaaagtaaagcagatccttcagtcgtcgggtcgtactcctctcattggtaatgaacggtgacctcccggtcgttccggtaatgttatcggtacttattaccacgtatgtaccggagtcttccgaggtgcgcaccgctgtcaagcggttgcttgactcgtgttcagacgcgacgctccagtatgtccgcacgtcgatgttttcaaagggattcagattctcaaatgatccataatcaccgaaaagatcttgaaagtctgccatggtcgatgaaccaaaagaacgctcgatttactcaggcaagcgtgcccgccgaaccatcatcatgaaaacttgtcgagctatatacgcgtgataaagttcatgactgctaagtcctcggagaatgaccgtagcaagatgcctcggagttgacgagcaagcgctacagtattgagaatctagcgtgccttcctttatatgaaggggcgcgacaagactttgtatggaggtcagaccaaactagaacaaaaaatattgtcctcggcaatagcatgctcttcctcaatttccccgcgcgttccaagtatttcgttctcgaagtgaagaagctagcgccggtttctctatgattcgaggcgaaccgtttatcgacagcatccgtttgaatgccatttcgtgggcgtcttagacatccagatctcatcctactcgatacatcgctcgaaactctcataaaccgggcaataagcctggtttttctttacaacgtcccgtctctgcgactgggaagaggagcatgagacataccgccgctgggaggctccccacaaatgcttgagacctctctagctatacaaatcctcggtctattcgagtgctcatttgcggtactacaaacgtctgcgagtttactcgtgctttgtaacatcgtatgagcgatatcattggggacaggctcgatagcttctgtatacatgacgcgctcagagcaaaactcagtatgtggttgtcacgtcatgactcgtaacgatatcatgacaacctgagtacgataccatactattgactcccttcatctcagactgactccgaataatctgcccatagccttggcatactttgcgtaagatcgggatatgaggggcccggagtgttgtgatattcctcccggactgggatagcaaaaagctctcgcagttcaggcgaactatccactgtggctatccaaccaacagcttcccattctctggcttccgcttcctctatctttaaacaagcgtgacgacgctcaatcaattccttcatccttgtatttccaggttccgggaactgcatcatgctcaacaattctagggctctggccgaatgatcaggcataacgatggctgtcacccgacgatagagtatggcccactggaaacggagcagggtatagtcccaagtcccgatagccgataaatccgccccccatccgatctcaagctcatccaacaggttcttgaaattgacaggcgttcgtctgctaccaggccgtagatagtatgtggtgctggtctctgcaggcgaagaagtgacaacggagagctcgcatgtgcgcgaggattcgaagggtcgcctggtcgatgctgatggtgctgaagtatccaacgacattgtactttgcatcaatcaaggctgacagtcgtcgagaagtcagcatcttactcatactagaacgggtttatatcttgaatctgcaatttgctgacgttctcgtcaaattcggattcttagcaagacgatatcggagtggataagcgttgagcctgcttacacctgttaccgagtccgctctatggtatcctcctttgtaacgaccgacagtgtacaacctacgcttgaaagatcagcgatttggtcaagatcgcgcccagaagcattatgcgatccgtaatcgtccgattaaattaccgaagagaccgtaattgttctgtacacaatgaacccaaggtttcccaactgcatgtaaacttgacgaatgggtggaaaggtccgaagctcgtagtaatctacttgtcagtcttggccttcatgcaaaacgatcacacgaggcggacggccagaatcccactgcttccgcaacgcaaagcacgttgagagcactgcacaggctttgttccgcattgcttgacgccaagtttggacccgtgggtggcacgtaagcctccctttcttctcagcgacagtcacgccatgctgaaacgcgatccgatattcgtggctatggagcttgagtggagattgaacgggtttgcatacagtcattggcgcaactccccatcgtcatttacggattggagtcatgcaggagctccggcgcggatcgaatgcgcggctagtgcacagtgaggctcgggggtgaacgaagcaaaatctcaagagttcatcgtaatgatgacgacagaaacatatcctcaagcaaacccgcgcttcggtttctgctatgcctcgagtattttagattagagttggttacgttgctaagacaattcttacgcatgatgcgtgtgatgtctgcgtgtgtaagtctcagaaaaccaactgagtggcttcagctctgctaagaaatccgggagagctcccagcagaagcaaggtcgctactcttagaacggaactagcggaagagcaccgaaagttcgactgaatccgaaagctaggcgcgatccgggattcgaataggcgcgatttaagctttcggaagcagatcggcgctatcgcggaccgagatatcggccgatctttccacgtcatttgctcgtcgaacatgactggactcggcgttgctcacatattatcagaaatcgattcccttccctactgttctcatcttggcaatgtagtttttaggaatctgtagtgcaattcagtgtcatcacgatgccaacagtagcttggaaacccttcatcacgcctgatcagctcgagatcgctgaggatggacgcaagatctcgttcaagacgcttcccaagaccgattggtggaggactggaaaagtgcacagcacgtccggtgcctacgtagccgtagagcatgacaagcttttgaaagatgttcagtccttcaagcttgaagctttgatcagcgttgaaggcggtcatcaagtgagtctgccttgaaggaatgattctcgcctgagcttaccctcgtcgtccacacgaaagttgtaagtcgagtcatttctagctttatgatacgctggctgagggcacggatgacgcagcgatcaaggaggtctatttctctacatctctgacatcctctggatcaagaccggtcttgaggtcgtagatgggaaagccagagtgtcctgcgtagtagcagattcctacgccgactggtgagactcgcagaaatgagcgacgtctgaataacgtttcggctagcttacattcacgcaacacagggctctttacccttttgaggggcagtccaagcataccttttcgatcgagatcgaaggacagaaggacgagcctctgcctctgatcaagatcagctacaacgggcacattctgcgggaactgcccgctttcggaatggctcaaaacgagatggagacaaagttccgagcgggagtcatgggctgctcccccctgtcagatggctgcaaggtgcactttgatgaggtttcaattggcacccactgagtgaggcaatcccgtagggtcagcgcattggaactgttcttgtcaaactggaagtagatgcaaagcccaagaatatgataatcatacaaccgaaaatcacaggaattcaatcaagacgcgtcggggtacatcgaaccctcgacgctgctcaaaagctgcgagtccatcttgctcacaccaacccattcccaaatctgcgcatttcgatgcgctcggtcagctcgagcatctagacgaacatcgctccatcctgccccacactcaccttccacgtatcgcccatcacttcctgctccccgacccgaacattggcgtttgtctcgatgatcggctggaccttggcccagagtctctgtcgagtgcttgcattgtggatatggtcgaggacaaagtccctcaactggttaggccggaggaaaggctcaggagcctggacaggatcgatatagtgggtgtattgctgcgaatatgacccgtgtttatcagcacgagcaaattcgcacgccaatagaccgatgacggacctggtcttgcaatctcgacaaggcggttttgacgagtttcttcactttggcgtcttctttgcgcttgttttggtagtacgacttgaggtaggcgaggagggcaagaccgaatgttcccactgtgacgcaggacgacccagatcagctgtcgtgtcaggaacttgtccactttcgccgatgagctcacagccgagttcgttcttgtgatccacgatctgttccgtcgcagcgatgcgcaaacggcaagatgccgacatgtctgcacgaacggcagagtagacgtcacgtccgctgcagcaagtcgctgtgagcatgtattcggtatgatcttggtaggagggagccaaggacctactcgacgacttcatggtgtacgatcttgtgtacaacgagatccttcaaggcggctcgaaggttctgcctgaatgcctctggggtaaccttgacctgcggcacggacgtcgataggcacggacgtcgatcagttcggaactcgtccgacagccttgtcgagcccgacctaccatcctgacgaaatgctgaaacagctcttcctctccgatcccaaacaattccgcctcgctcttcttgtcacccttgtgcttcctcctcgacgcaccaccggcgcagacgacctcgcccttgcgactagccaaccgttcttccacctttttcgcaatctctccgatctgcgccttggtcttgacgtccaactcacacgtagggggaaatgcgaccggcccgacgccgggcaatccgctcagcgccgggttgagccagtcgagcagcgggtgaggctcgaggatgtaatcaccttgacaaccgttgactctaccgtccttgcacatagcgtgactcgggcaaggcgtgcacttgtcggcccggggtacgaacccgatcaggggcaactcggtctcgtaaggacagacctggagttgatcgtccggtacggcctggtcccgcctcttgacctcgcgctcagcgacgcacgcgttggccttgacgagcctagcttctttggccctgatgatcgaattggatgacgtggccgggtcgcagtaaccgagagggatcgattgttgctggaactgataagcccacagcaagaaggcgagcagtgccatcaacatggagaatttgatcttggtctctggggtcgaagcgagagcgttgggtccacgttggaccagccgagattcttcctgcgtagatcggtctttggagatgggagtcaacgtcttgacgggtgacgaaacctctcgcgcctttcgactgggagtctcgtgctgtcgttcgcgttcgaccttgacgtcgacgtcaatatccatttcgtcgtcaaacgcatcaggcgcctcgtgatcgacgatctggtcctcggcgaacctagccaccttgctcgggctcccctgagtgacggattgccgtttccaaccctctggggtcgtcttgaccgacttccaatccggttcgattttcctcggcgaaggagatcgttgtaccgggctcatcgccgaggaagcgaggttgatgatccgtttcaccggggaaggggtaagagatttcgacggcgaggtatgcgcctcggccttggcaggtgatggctggccgacgggtgattcggctgcagggttcaatccggacgatttcctctcccccatggtctacaaaacgtcgtcgagcgaaacaggaaaagtagatcagatcagtctcggtcccggaacttgcccctcggcgggaggtcacttgacgtgcaactgaccttgcgtttagtctttctcggcgtctttttcgttccgatcatctccccctcgtccccctcgccgctctggaacggattgtaatccgagaaccccgactcttcccgtccgctcacgcccgtcggttgctttgacgtggcgagcggggtaaacttgttgggcgattcgtacgtccggctcgcacccgcagtcccagcgttcttcgtcaaagtcgcaggggtcggcgtggacatgttggaggcagaggacaaggcgttcttgttccgagaaggtgtctacccgaccaccggatgcgtgtaagcgcgaggctttttcaactggatggtggaacgacaatacgcgcgtaccttttcccaaccatgttcctcctcctctagctgtccctcgatcccgatctgaacctcgggtcctagtcccagatcgagcgccccctttttggttttcctgctccccttcttcttgggttcggaaacggactctccccctgcttcttccacgtgttcagggaaagaaggcacagacggtttcgtcctcaaagtcgagctaggtctagggagaccatccacggacagtccgttgggcatgttgtcattgttatgaagaggggcggtcaagggggtctgagaccgggttatccgacgagtctgcaaaaaaaaacgaacaatcgacacatccccaggatcagcaacgacatcaacgattccactcgtcccggctggtgaaatctcgtcagactcactcgtcgtcgagcgatatcgtcccccgtcccagtgaccaccaagtattcatccgtcggtgccgtgaagacgtctcctgcctggtcttgctcggcctcgacctccatttcgagtccgagttcgacctcggcgggcgccggttcacgaggtttgacagactggcgggatcgggaagggatagatttgacgatccggggaggttccggctgtgagcgtttcccaccaaaatgcatcgatgggtacgagccagataaagagggaggagataagcccgcgaaaggtgtgtccaattgatcagtaacccgccgacgccgacgatcccgcgagagactcacgctcatctccaccccatcctcatcgacctccctgatcccatccgtactaggaaccacgctagacgctcgatcgtggtacgccctagctttggatttgacgcgatcgagaaagaggcggacgaggtcggctttcttggatgtcgaggggatgggaatggagtgttcggtgaggatgccgcggagctgggcgacctgcgatgcggggggtgtcgtcgtcgtcgtagtgaatcgattggagatgaggtagaagagtgaggtcaggccaggggtttgtcggaaagaaagaaacaggtgattagcgtctgacacgtttcgagaggacgacggcagggcggtacctttaacgaagaaggttcgaacccgggggcgaggtagacttctgccgtgggtactgacgacattcttggggagagctacgacgtgtctcttcggtgtcctcgtcttgctggtgtcgtcgatgatgacgatgtgtatgtgtccaacggtgtatgtgatgatgatgtgtgtgtgtgtgtgtgtgtgtgttgttgtgattgtgaagggtcgattcctgatttcggtttgtttacagtttgcacgggaacacgagtgacgaataaaaaagatgaagctgggtttattggaattcatcatgtttacacaaaaaggtaccacctagaacctagtattcgtttgcatgtatacacctcgactgattatgctaacactcatattggataaacttgttgtacatcttgacttgatagtagatcgaaccagacgaacgggtcgaagacgaccctgcgaaccaatataatctgaattctccgcgtctcgtgtatcgtatcgtcgtttcacctcgggcggctgcacggattttgctcaacctgtccacgtcgtcgtttcactcttagccggggcagcacatcctgttgaagacgatcgagatgggtagcttcaaactgtggccagaaaattaatcaacaacgtgtacgaacgaggtggcaccgaagagcgactagataaactttgagcacggttcaagtcacgtgatactttttatgatttcgcttagtcatcatcgttccaatcctcggcaggtgatcgatccattcattcatcgtcaaacgttaaagtcgaatcgaccacacacacacatatacacacacaacccactgctctacccacctcagcggcgctcgcacagacgcatacgaacaccgccatgtcctcctcgaatccaccaccgacgatcaccctcccgaccccctttgccgagtggctcgccgacctggaaaggttcatcatggacccaacgtcggactcttcttggcccagcttggacaggctcgaaggcctcccagagaggatgatagagagtttacaggcgattacgaccgagatctgtaagtcgagccagacttctaggatcaacatcgttcatcgacagacatcctgatgctcatcgagaggacgtttgcgttgatcgagatagataggcacgtcattgatttcgaaatcccgagcatctccctcccactccctccattcctctctaccccaccacccgggggtggaaggagggatcggggagagaggtgtgatgtgacgcaggggaggaagaggaaagaggacaagcagacgttcggcttcgggttcgttcgagtcggtactcgatgtagagtgttgtcgtgaatgacaaaccgtggaaagaggatatcgaaccgccgggtttaccagagtgagaggcaatgtttcccggcgaaagaggagaagagacgggtaggaggaagagagagagatagatagagacagagacaagagccggaggaccgggcccgggagtgtactcacgattccagtctcactacactcaaagttggcctcggagacgagtccggtgatggctgcgtgatcggtcggtcgaacgggtcaggtaaggtgagtcacgaggaaattcatgcgtcgacgtcggacgacgattatacgtaccgtccatgagttttttcaagattgatgcggtttccatacgagcttcgagcattttgggcgaggagacgacgacggcggcggtctgtttgtctgttcgtgtttggggtggatggattgcgaactgcaagaatagtgtgtggtttgggggcgaggtgatgatgtcgttgaatgaatgatgagttgatgatgtcgagatgactctcgatgtcgacgcgacgtggatcgtgctagtgtcaacgcgtcgaaatgaaagaaaaaggcgcgtcacaagccagagcaggtcattatcatccgcggtgcatacatagtctggtttctcatctcgagaacgcatcatagacaaccgtgtcgactctattttatgcgttatcgtcgtgatcatcatcttggaacctcatcagatcatcatcgggttgataacgatccatgtctgtatcgatcgaccttgtctcttctcaacttgccacccaccaacacacacactgaacacacaacccctcaacaccctcctgcgatgctcctccaaacactcacccggacccccgtcctcctgcgtcaatccaccgccccagcgctcacccgagcttgctccatctgcgccgcccgttccctcctccctacttatggcaagacgatcatcccctgtccttcccccatctcgacctcgccctcgttctccggatcagggtcatccatctcccgaccccgaatcgccgcctcggccttggacaccggcgtcgacagggcggtcagggggatgaaggtcaggagtagcgtcaaaaagttttgcgatgggtgttcggtcgtgaggaggaaaggatacctttatgtcgtatgcagcaaggatcccaagcataaacaggcgagtctcccgagttcgggtcgtgtgtcgtattacatcgtgggacggggctgatttcaccgattggatccgtatggacgtgtatgggtgtacagcgacaaggatgaacacaccccgccacctcgcctctcctggacctacccgggtcttccctggactagctagctagccagctggattccccttagtctcttcgatcacccccgtcttatcttatcgacccgttttcgtcgcctcgcctcgtccatacgatatggacttatggacttgtactaccatcccgaacccgaacccgattatatcctcacatcagacaccatgcaccatacatcacacgcctataaacatatcgatgaccaaccgaatgatatcctcatccgggtttcgtctcgtgattcccatctccattcccggtccagatcgacccccccgacggtaaacgtccggacacgcttgatcagcttcacggagcatcgaatggcgcaggcgtaagatggtacacatgctaggactggacaggataagagtactagttcagggcttagtcgtctggatatgggttttgttcatattatggaaatatcgatatgggtacgggtatgggcatgagcacgagtacgggcacgagcattgaataccgggtatgcacacggatgagggtatgaccgtcatgtcgttactgatgatggtaatagtgaatccggtgggcctgggaggccgacgatgagggtcgcgcgaggtcatcgatcggatcgggtcatgcgtggcatagtagggcacgttcgatgtcgaggtgtcgtcaactcgagggttgcaagtttgggggatgtagatgcggaacggtgggatgggagcgtatcaagttcaactccaggaagactgggctttgagataggtccaggagatctaggtcaattaggtccgagccgaggagttggaagagtgtaggacaagtgatctgctttgagccaacgtcaaacggattttgctcatacgtggatcgttcgatgagtacaccgggtcgatgacggcgttgtaccacttggctctcaaggtgttgacctatccacaaccacaatatggacagcctgtatcagctgcgcgacaacgttaaaagaattctcggaaatcctccgtaatgggcggaggaactgcaacagaggcgccaccgggtagtgcagccttatcccgcaacatcactttccgacgtcatgaggggcgacgaatggggcctggtgcacaacgatgggtgggggctggtgctcctgcccttgatggtcaagagcggtcgggttcacgcttgataccgagaaagattgcaaacggtctgaccatcgggaatgccttttgtataatctggacagagtatggtcggaggtcctcgcctgttcttgaccctgcgatcaaaggtagacaattacgttagcggcccgaccatgtgatcacggcagtgagcttgactcagtacagtgtccaaaggaagatgttacctgtatggtggcaggttgcgccatgatagcgtgcatgcgatcaacgaccggtgtttagcctaatccttgcttgcacccactgacaagagcgtgaatcatattctatgctgtcatggcgggtgatactgcgcgcaacgcgcaggtccgctagtctacaagaggcaaaaacacgacttcctcttcaggtcatactgaatctcctcgccccttcgggtcatctgacgcttcctctacgttctcatgctcagaccctcgtcggaaggtaccgcccttttttgacctgttccttttccggctcgcatcctcgcgattcgccatttccactggctcttccgtttgccccgcctgactctgctcgtcagtaaggtaaggcatttccgacagttcctgctgcgtctcgaatgtgcttgcctgaaggtcccgtctggcgcgacgtaacatccctcgttatcttgactgccctccgtcagggcatcgctccttgactgggttatcgaactttgcgcggagagaattgtgctcaatgtagctttggtaagctgggcgactgccttgggatgcatgttgacttcagctcgggtagatgagatcagcatcgagcagatgtagctcctcttgaaatcaggcgccgtgcgcctctatacagccgtagtagagtgcatcggaacagcgcatcctcatcgggccgtctaggcctcctttctaatcgcagcgtacagagtgtgtgtttcagggcccgatatcgtgctctcggtcaaagggcgtttgtcgattgcaaccaacgaaatgttaggctagccatgttggtaacactagatttaactttttcgggtgatgcaaggcaaaatctgtcgtcccccatctcttcccaccaataacggtggtcacgagcaaaagtgccgggctcggagctggtacactgatggcttaacatagagcgcattgacttttgctataccttccggcagatcgatggtcaaagactgtgcgccattccccatagtttcatatccgctcggaggaatcgattcatctaaccggaaaacgtagagtcgcctgccatctaaataccgctccgaaagtctccctcagtccaagcgtcagaattcgagaatgagattgcgtctgtgtccacatgcttgtcatcgttcattggatgatagtcactcggtcgaccatgagagggtgtgtaaaccgtagtatttcgtgggaactcgaaacccttgtttgcagggcaaatcactcgcgtgaccacgatcgggacaacgtctgcgatcgcgacggaagaggccttcatgatgatgtggagaaaggttcagtcgccctcttaaggccacagctgtgaagtgagcgtaaaagcatcgctactatcaccaatgcttgtgaagatctctcagctacaaactggagacttcaaatgatcgtccggctgaaacgctgccgctcgtcccgatggcgccacacaaagaaggcaacttcagcacagccggctgacgccatgttcagtcaacccgtagctatatctagcgtgtgcattccacgtgtaacccacgctatgcttgcgagcgatgaggagaattctgctgaacaggaacgttcaggcgggaacccagcattatctctggagcccctcgcccgtctctgcgttgtgacagctacgctcaggcaaaacgagaagtccttgcgcttcctcaaagtctgcctgccgaacgaacgagcggaacaagcgcgcgctaatttcgtgggaatcacgcgcgggatcatacgacatcgctgagcaaggccagttcgcacggctcgcgatcgcctgctgagctgctggtcacgattcgctagcaaaggttgatgcgagatgcaagtctcaaaaggtagagttaccgaatgatgaactgacttccagtgctagcgacctcgctttacagaaccttctgaattgatgaaggtcaaagatcggatgctatgcagagtaaatgaagtgcatatactaccgaggatgggaatccagctggaattaatggaatgaaccgctcgaagatcgaaagaattgccacttcagcacgtcaggagcggtttcgatcgtcctaatttgacaggtcacaccgtgtattttcccttgatcacaacaacacccaaatggtcgagaaggaatgttccagcacatcatagccgtctcgggaggactctcttgcgcgcatttcacgtgatgatatgcagtctcgccgttgacgtagatggctccggggttaccagatcgggcgaaacaagcggtttcgatctggaacccgatgaccgagtgatcacctcggaacagtccgactgctcgagtggcggggcaatgactcacggataacgcccgaattggagatcccactgcgtcttgcgtaacggaatttgacatttcccattgttgttgtgatggagtggcaggattcccacgacttcggggccaatttagcggcgaggtgacaacggtcagaaggctagtgggaaccgctcgatcgatgaattcgccatcggcgatggcgccaatggcgaggttccaatgcgtcacctccatctttccctcgtgctcgtgaccgctgtcgtcgccatgcctacctgcccgttgacctctgtcagaaaacggtaaacaatcacggctccttgttgtcgcggtagctcccgagactcgcatcgatcacggtgaccgaccgaatcgagcggtatttctcgatccgttcgatgaacatccaggtgtccacccagtttcggccgataaccggtgtcatatcgacgtagagcgaggtaggtcccctgcctttcttccctttgttgacatccctatcgggaatcgctagtgcccatgacccacccaccatcgccgacaaagtgacatggctcgtcagatcgatgatatcatctgacatcatcgattaccgcttgtgacctttgagcttcgcaacgtcagcgttccctcacaaatttgagtatatataccccttcccccccgactcaagtcaattttgctttttcgtctctactcttctcatcacaactcacgctcacactcttcacccacaaccaacccaacacacaaacaaccttacacaatgtcttcccaaggagaaacctacaagccttccgaggtaagcttcgcgcttcacggttctcgcgtttttacctcgactaaccgcaagtctttcgtctttcagcacgacggtttgaagaaggacggtacccccgacaagcgagtctcttctgagcacggcttcggcggttctgatggccctgacccccacgttgaggtgagcatcgagaaagcaagaactcgatgcatagttgtgctaaattgacggattttggatcttagggcgccaagggaggcaagtcttccggtaccccccaggaggagcagtaagcgtagcctagctacataagcgcttcgaacacaactatatctattctaagaagttggagtttgcgaggatgcagaggaaattgaatgtaccgaaatgcacagtaatattgaactcgtaacttgaagtactcgcttggatttacctccgcaagtcgtttggatatgcttccgttaaatgttaggatatgctttcgtagaatgcttccgcccattcacagtccagcgcgtatacgcctttcgaacagaggtcggttgtccagattacaatcgcaaccaagcggtctctccgcacgaaacccaacagttgaattcgaagttcgctttgacgagcaagtgtatgttactgctcaacgccttccgagcgactgacgatccactcccaggtcgccgctccggtagacgcgttttttgtcgatgtgatcgtgacgaaagccctcgtaatgacttcagtcttatagaagggtctggactgagtcacatcatgttcggaaatgaacgacgcccatcgactttcgacgcctaaacagcttcctgaatcttaagagagacgtgatctggattcatcgtcaatgtcattatgccactagtcgtgtcgtttgccgtttacaaattactaatggctaaccccacactccgatcgaaagcgtccaccatgcgttccttctcggctcttcgtctctcgagcagctcgagctcttgctcacacgaacgtacgactgccacgagcatctcctgcatactatgcctctgatgcgtctgaaacgtcgattgctcacgttccgccctttctcgctccaacgtttcttgcaaccccttgacttgaagttccaacgccgcaatcttggccgacgtccccttgtccacgccgaaaacgtccgcagccttggggccgatcgcgccgttactggtacggccaacgactttcttgcctcggctggatctcagcgagccgtccacgttcaactcgctcattctccccgtcaatggactgtcaccctcggctccgagatcacgacgactcaacccgcccatccatgtccttcgtgcctgctccaacctgacatcgatatcgctattattggacagcttgcgcgaacgagccgactcccgactcgcgggtgtgccccgcaacctggtcaaaggatccttgcgggaaggggagatcgacgtcctgctacccggtttcaaagccggcgatgacagcattttggatctcggcgtctgacagatcgacgatgccgccggcgatgggtttgtaggagtaacgccgccgacatccagcgcgaccttgtcaagcggatctcgacccgacctgatggcgcgaatcggatctcggcgatcggtgggatcgggcgtcgttatcaattttggattcttgacggcgtcttggatctggacggcgttgactgcggttcgggtccgcgtcgaggtcgacgagcttgatcccgctttcgtgagcaaagacgctgaaggttgcgccttgcccaacgtcttggtcgccgttggtgtcgcctcgcgtcgagctaccggctgaccacgtgccggggtggtcgtcaccttttgaccgcccgtcctagcgatcgttgttgatgcccctgtccctgtcgccctgccccgcgtcgaagcggtactcgccgtcaacgaccccctctcctcgaccttcttcgattcattgcccatgagcttgtccaacgtactctgcctgttcgtctcgacgtcccctagatcaccgtcgttggacgtagatgccaagatctcctggctctccgaggcctggacgaaggacaacggcatcatcgaccgcctcttgatcgtcttgagcatgaccgaaccgtctgcttcatcctcggtgctaggctccttctcatgcccgagcctggccgaacgtcttgctggctccagcgtcggggcgatgactttcgactttgcttgggattgcgaccgagactgcaagagggtcatttgactcgccctcttgctcaaccggacgtccgagacgtggtcgagagcgacgtgcatgacaggcgtgctcgaccgtttcgacatctgtgtctgccttttagaaccgggtactcctgctccgatctcgagggggaccacgggatcctttagggtcctcggtcggagactcatccccgtgccgatcgtctttggttgttccctttcctgcttatcgacttggccatgcgtgtttgctattccgacattcgtcctagccccaggaccggccccgttctcgttcccgttcccaaggctgacgatcgccgaaacgctcctcttatgcctcaaccctaacccctttccaccgaccgtcatctcatctccctgcctagccgtcgtcctcttgctctccgaacccgccaacgcagggatccccgaacccgtggctttcctgctatcccataacatcgaacgtctcttgaccaaccccgattccaagtcgacgggcgctgtcaagttgcgtttattcttccccggactagggatcgatgttccttgcaggacggtatcacgttcggaagacgggatgaagaatgcgctccttggtctccccagcccgagcgcagggatcgatgtaggggtacggattaatgataggggtcgggtttgcggagatgtaggttccggatcggatttcgaaggggaggacggggggatccgttcgtatgagatggggagggtcacgttcctcttccccgtccttgggtcattggacccggtcgggatgttacggactccgaccggacgacgaagggtatcgtgattggggttccgagcgggttcttctaggttagatgtggggctcggcgtcgtcgaggtgggatggtttgacggtggtagtgattgtctaggatcgaacggatgagaggaggagacgatcagccgtgcgcttgagaccacctttgggagaccagcgcttcgatatttacttttcctcttggacgacgacgaaccctgcatcattctcgtctcccattcccgattcgttcccctcgtcatcgacatgccgaccgacgagcttcccagccttcctctgcgtctttgtcgtcttcttctcgtctttgttgttgatcccggctagcatattggagctattcttccggcccatcgaatggagacctaggctggccaacatcccttgtctctttggtctcggcagggtagacatcgtggtccaactgtagcgtttttgtgtcgtgtttcgagtatagtatattgcgcgatgtatgagtcaggcgtgcaattcgtttatggtcgttggtatgcggatcgctgttgtcgtaaggtctatgtcgtcaaaatgataatgaaaagcggttgtacggttttgatctgatggttcgatcaaggcgtgtgggaaggaccccggcgttgatgcctagcggtagatttcgtgtatcacgaccaagaagaagactgagactgagcctgagcccgcgcccctcgtcgcacgatgcatgtaacgacagaatagactagatgctagatgcaagttgttgatgcaaggtaagtagatggatggaatggatggatgtctggatgtttgttgttgattgcccctcgacgcccgtttcaactttgtaaacaggagaaaaacgaaaaagtgacaacgacaacgacaacgacaacgatgaacgatggacgggcacaactccgacaaggtctctcgttcacaaccatccgatgctgtctaaacaccaggcaaaggctaccgcagtcgacgagaggccaaggcgtagtactgtacactctacacgctggatgtttcatgtttttgatacgttgaactcgccaagcggtctcatcccgaccaaagtacaaaccttgtcatgctgctcatccgtacagcgacactcgggagaggacgaccaaccctgaccgaccggcagtctagggtgaccgtcctcgatccgtttccccgtgcccctccttctctccaagtctctctacccactagcgcttcccacccactcccaagtcacgtccatcaacccgaccgacgtgtccgccaattgggtgaacgcggacgggctcaaatcgagatgacgcttttcgcacccgggacacctatcttcgatcctgacgacgacggatttcccttgatctgcacaaatagacgtcgcgtgggttagtctgccgccattgcactctttccgggcgattggaaagcaccccagccgaggtgggtggggtggggagcacggtactcacaagacaccttggcgtactgtccgcaaatagggttctggttcgggttcccattcgcaccgggccaggaatcgaacaagtactcggaagccgctgcgatctgtcgtcgcgtgcacgtagaacccgaaaaatatcatccccgacgagattgtcaaggtttagtcatcaataactgatcagcttgctattcccattgccattcccgacgccgacgccgacgacgacgagctcggcttaccaaatcgctatcgaccaacttgttcccacaggctcctacggcgttcccatccgttcccaagacgtaatacgttgactccccgtcgaacggtccgttgccttcgtaatccttggatgtgaacgctggcgaggtggatttcgaggtggtcggtgcaggtgcagctgcagatgagggggtggacgaggaggcccgggtaggtttaggggtggaagaggccgtggtcgaggtggttgtcttagggatgacgggcgcgttctggacgggcaacgagctcgacatcgaggtcgaggtcactgggacgggaacggggatggtgacctgcccctcctccgccttgcccgtcgacgtggccacgggactgacgaccgagctcgaagaccccgggagtaccgatatcgacgtcgtcttcacactgcactctttcctcttcctcatcatcctcttgcccttacttctagcttgaagagcatgcccagcctctcgcctgatctgagcttgttgaccgtggatggcggccaacctgaggttatccgggtgaaacgggttgtacgcggccctgccttcgagagctcgatcttgagccggagcgggggcgggagcgggagcgggggaaggcgccgtcaaggccgggttggccaggagggcgaggagggagcagaagatgattgggagggattgacggatgaacatgttggtcggagtcggggcggttgtaatcgttgtcgttgttggggtaaagttcgaaggttgtaatcgaggggatcagagccggcctgatctcgtagatttcctatagtcactactactctcgaagtggcggtgtgctgttgcgtatcttgtcttgtctatggtctaatatcacaaagtcaatctgatgatgtcgatggtgatggtggtgatgatgatgatgatgatgatgatgatgagaaaaaaagcgaaagtccaaagagatggtgaattggcaagttgtgaagaatcgacctgcgatcttggtttgacgagtccagaacgatacagaagagagagagaaaaggatttgctggaatgggatttagtagtgatgagaatatgtcgatgatgggtgcgggttttggttgctggttgtttataacccaaactctgcaactctggacgaacgcgggcatattcaggacaacaacgcgttttgtcacaaacaaggaaaaggtcaccgcatacagcacagcatcggcacacggcacattccgccccgtcatcccaaagaagaacgactacgacgacgacatcgtctcctccgaatcacaccaaacgaggctgaaagttcaatcgatcgactctgtgcaacacaaagtcggaagatggcggggagacaacagaacaatctgatcagaatgacctcttgacctctccttgctcggtttctcatccggatgcggtgaaatcggaacaatctcggaatcaaatctcgagccggggagacgcgactctcggcatcgaccaagttccgctcccgccctcccttccccgccttgactgatatcaatttacttccgccaactaggacgccaacgcgtgttctccctcggaagggtgatatcacccgatccgacagacgcgcgcagagatcgaggtttcgtctttcactcgctcacttcgctcacctcgacatcctgtgtttatccattccatgatatcccgaggaggaggacatctggcgacgacgaacgaaccccgggctcggatcgaacctcgataatgaccgagggcatctctttctttatcagtctaccagtcgatgccccttgtacgtacaccgatgaccgaccgtctgctcgtgatgggcggtgtgttgctttggctcgacgatgaaagagatcactctctctccttacgacggcctcaccccgagacgccggaggaagatcatcacgtcgtgtgctttctcgtgggacccgacctgtgggggagcggtatgatcgattctactcgtccgatcgaagcgaaatcaggttcacatcgcacgcacgacctcgagatgctttatgactccatcgtcgacggatcgacaacttgattcacatcggctaaaaattgatatcgatatcgactcgatcgactgtcttggccgagaaccctcaacagtggatcatctcccaaaggacggagattgctgtaatacgtttcgacctcgatcgatcgatcgatctcatgcttgaatgtttccctggtacttcatctttgtctctagaagacttcacgaaggaaaaccctgatcccaaggaagctagagctatcctgttgtccggatatgacactccagatgatgatgacgaagagatgaatctagcttttgatgctgcatgtaggtgaagaattttctccctgtcgggtgtgacacttcagatgacaacctgctttcaatattatgcagatgaattcttcactggacgtcatgaacgtggggatgaaacaaaaaaatggatgagcacagagttcagagggaaagtctcagctgagggtgctcttgccgaggtcccgtttgagcgcggcatcgagcaaggccgacccgacagaggtggtagcgatggattctgagatgatctacgcgatccgccttgtgacagaggtttagaaacctgaagtatcgggtcggtcgagagtgccattcatggttgttcttgggaggctaacgtaccggtgaatcgcaagcaggcctctttatcctctatgatatgaggcgattgcgtttgatcgaattgctgtccatattattgttaatcaggtggtagggctacacgtcggtcgaatcatctgagcatagtcatccgtacgatctgggtatattatcatgtacatcggatcaaacggtcctctacaattcactcgggtatagttgcacggcccacaaaacatcaaatctcgttagaaagaaggatcggttatcgtaattgtccctttatccatcatcgtcgcctccttctcatttcaatgtcgaactcaatctcaagcccacgccaacgtcttccccgccctcgtgcccgcggttctccccgtgatcgcagccgcccctcccctttcgaagaattcaaggagtacgacctcggcctgcggggtaggtggcatcgagagggtagagatggatgtcgatctcgaggtcgggtcgctctcgtccaagtccaagtccaagtccaggtccaggtccaggtccaggtcgagatcgaggtcaagctcgggctcagggtcgtcccggaggacttcctcgacagagtctacgtatcgaaccgagggtgttctcgtagagtccagatccaacctcttcaacgcagccaggtcgagctccatcttctgtccctgctcttgctccgtgttggtgtaatcctcacgctcaccctgatgagatctgagcgacgaacaccccgtcgtcctgaccagatgaacaccccgttcgagctccaacgggctctgtcccatcgacccaacataggattcttcttgcacgtataacgaggaccgcgtggcggtcatcatcgaggtccgggatcgaatgagggtgctcgttgtagaggtgttgaagccggtctttctcgatcgaccaaaggcggggacggcgtgggaggacccgttcgtccaatccatctcgtggcctaaactcacgctggaggaaccgaggttgggagccgtggaaggtcgggaagaagctcctcgcctgcgtctcctctccagcctctgctcagtcgctgcttcttctacagtctcgatcaggtcgggtcggccctcttcgtcgacaacgtgtttgatttcggatcgctcgagcaagggggatctgggagggtagacgaatgtctcgcccatcatcgaaccgggagctcggatccttgccaattctcgttcgtgctcgggttttatgaacacaaagagggatactaggttgaggttcgaggtgtgcataggaaagacctgctcgatgggtcggtcaaaatcggccatagatatcggttcgggggcgtttggtgggtatctgaacatcagacatgggtgagccattgatgaaacgaccgttaagtaatcactgccaagactcacggccagggcatatcccccgtcctcaaccctccgaatcgttcgcagttcaacatctctttccaactcatgtccactcgccagaggacgactttttccctcaacctctccaccccaccaggtcgtccgtcagcgcggaggaggccgtccaggacgtcacctatgcgagcgtcccgacggacatcgaccgctgcgggtgggtaaggggtttcgtctttgtccaaggaggaagaatacagggatgatgtcgagggtccgcgggcgtgtcgaggtcggctgaagagggtaggggaagggatgcgcggagagctagagctcgagtcggagggacgggcgaagtgcgcaagcaaggtcaggggttgtacatctatagacgggtaaatgatacactctcagcttgatgtcctcttggagacacgacggatagcatcctggcttacgttcggcttcagcttctcctagcctgaccaaaacctgaacctcgtcttccttgatctcctttgggtgaggccaccagtccacaaccctagtcgacctctcgccatagtccctgcgtaaactctcgtgggacgacctcgaatgacatgccgacgaagtcatcgatgacagtgccagctgagccgggtccgaaaggttgtacgaggggaaatgtgagacgaggtgaacgggggtcgccggattcctcgagatgaatgcctgagcggtgtgatgagcgtcgatagggatggacaccttgtaacaacccagcgaaacacctctccgaagctttaatgccagcttgatctcgtaggcgacgtcggcaatgtccgcttcatcctcgacactgatctgcatgatgccattggcggccgctgtcgagccggtacccagaggcagtgggtccagcaatacgttgagcttggtcattggcttgcatggcacgacagcttcttcctcctcgatgaccggggacgagaatcgactaggttgctcttgaacgatgggtgaagatggagcggatcgtcgaccgaggaggaaaccggtcgggaacgatggtgattgagggatcgtcgggctggaggaggacgtcttgtccttggaacgtttcttgagactgaacaaacccatggcgagcgtggcgagttgggacgatggtcgtggttagtttgtcaaggggtcgtaaacgagactctcggccatgcaagcggacggctttgaagcgacccagctcgaacgctttattagctttgaagggatgtacatctcttagtaatccggaccgatgcattgcttgcgaatcaacgtttcaaaacaaataaagtaatgatcccaggagacgagcgactatccagtgtagtccgagagcccggagttcaatgagagaagtcagggagatcaatgatcccaaatgaacctggatctggatcaatcacctgtctcagaaaggcgatctcaccgggctttgagcagggcaggctgggcagacgaccatccggacggagagttcggcgtggcgcaaggggcaacatgacgtacctgattcaccgcgaccgtgatgccatcaggaaaaaaagatcccgtgccgaacgcgaccattcctgcccgggccaaaacgaagaaaaatcacatccacgttgtaatcgctgtcactcgacaatcgccagggtcccgggccggtcatcgcttggacaatttccactcatgtacaggcaccctcactttggacagacccggcatggcgcaggtcactctgcgacttcaaagggccagtgtttctcttccgcctggccaacaatccgttgccaacacgggacctgaccatgagcaccacaaagccataagatgggttgagtctataggccaaatcctcacatctcgatccatgtgtacacttgtcgtatcgtcgacgtcctcgatccacatccgtgctttccacgcccagcgacttgttcggagccagatgagaccgtgaaacagataatcccacgagatccaggaacacaatgttgcgagatgggctcgtctatgcgtggaagcgaccaactcaccgaatggatcacgataatcgagcgttttcatcggagagaatgcagcatatcccctgtcgcatcgggccgtcctccctcctccttttcgcccattacggcacaaacgtgatcgtggctactatcgcgattatcctgatgcgtgctacaacgattctgctcgatcaatccgctcaatctcgtacgaaatacaattaccctgcctattctacctatcatgtgtacctttccatcatatccagatgatccagatggaactcctctccaacgatggtcttcaggaccagcaataagcgatcgaaccgtctcacgctgcgaatcgatcgggtcagcagatgcgcgtcgaaacctactaatgcgttcgacgctgctcacatcgaaaagatacaggtcgttgaaatagcatatcgcagatattcgtctgcgaggataatggccgtcgcgttagatatagccaagccaagatgtatcagtcgctacagatgacttgccgctttcgagcacgtcgacggtgacgtgctttggcaaactaccatcttcgtcccatctacctgagacgacctcgagaccgtaaccttgtgagaactgtgattcaaggaacacattgagccgataggacgccgaattctccgaagcctcgcgggacgtaccagtcgttcgacaaggggacctggcgtgacctgtggcaggggcgttccagatttcaatgccgaagcacacatcgctaccgagggtttgagtagcgggaccaatccaattcagtcccggggtcgtacgcgatcaaacgtcaattggttccgatgacttacagataactgccaaaagatctccgatgaactggctatctgaaagccgggttcgctgcaatactgcccgtttccagacgtagggcatattcctgtcatggagaccaaacgtgtcattgccatgcaatgtttcggattagagcggacgaaagcttacacggaaacatggttcagctgcgatagcagaccaaccagatcgacacatacatcctgtagtgcttgatatctggctgccggccaagttcctcgtagtgatacctcgaatccgatcgtagcatgcctagcgctaagtttggcaagcttcctcttcaaagccagaaccttgtcccgagtgacgccttcgtcatgtggatgcggatcatgcatctcggacaggacatcacagaggacattgccaatctgactgatggtcccgctgtagctcagtcggatctggcgtttcccagactgaacaggtggaagctgtgagacgatcatcgccgcagtggtgccgatcactacagtgacgaatctgcaatgcggaacagtattcatcagtcttcatacccgatccttccaagtcgattgacttaccgtcgccaagcggtcgaccacccatacgtcacgtccgtagcctgaaacagggaagtattgatccaactgtagccgataactaatcctgccgagacggtgtacaggatgaccaccaaaggtgtgccagggccccagagtacccgcagcgtcatcagcgggatgaaagacacggctgtaacaactccgagaccatagcgattccctgttccgcttccagacgagatataccaaaggatcaggccggtaaggcagccccagaaggacgcttgtaaacgctgaaaaaatgccgcgatggtgtctccagaattgacggcaagagtcaattgggccatgaccaggcaccataaagcctgtttcgcaagtgtagatcggtattagagaagccatcaaggtgcaataggtcacgattgactcgccctgttgtagtaccagaacctgtagaccaaaggtgacatatttcagtgctcttgccttttcgcagtgggaatcgaccactgacccggctgtgttagggacgtaagctggtgcggccacagcgacggtaagtaatccggcctttacagcaaacaggaattcaggtttcgagaaaaaggccagaccccggtctatataacgcaggccgttcaatatgggactatcaaaaggcatggtgtcgggatccctccttttcgcttgaccaagcagcggttcactggcatcgtgaagcgcatggtctttcgtatggcacaagatcagcataatgatctcagatgtcgcttgtctacacctcacctgggtcagtatcatcgctgacatccccggtttcatcgcctcctgcagcctgtttccgagcaaagtatttaaagttgatggggattctgggccaccagaaagatgcctttggtcggagctcatccagagcttcctgtttctccaagacctccaagaccgctcccgagaattccgaaatgtggtagctgaataagaaaccccagaacaaggcgcgatgcttgagctttttatagtcaaactgatccgatggcggatgagatgggtcgaggaggtgtcgatatggctcgatgatcttcaaacggtcgtgcgttttgaattcgttcaaccgcatctcgagcatcttcatggaatgccgatgttcttcccgttctttcgcaggcttcgacttgatggcctgactcctcacgaccgagagcaaggccttgtaaagcgaacggtctttgttcgccttggacagccaagttgacgccgtttccataccagccttgagctgcagtaccaaaggctcgacggctacggcaagcaattccatctcttgcgtgacatgatcaacgtcactgcgagaggcttacttcagtcggagaagaggcgaagcaaactaccaccgagactcaccctccttgacttcgttccatttccaagtatttcatgctttcaaaaatcccgactggagcctggttcttgcgcaaatggtccatcaaagaagtgtgacttgcaaccttgtcagtaaagctgagacttcgcgggaagctgtgagaaccaggacttcgatgccaatcgaatggtagatgcagccgcttcctcaggctgtaggaatgagacctatggctggacaattccggtggactcgtttcgtgatcgtccgaatccgcgaactcgttgggcgaacctaacggggtcgctgtcgtctcgcgaccgggatgttcgtccgccaacggcgatatgacgtgctttgacgagcgtctctcttcgtgtaatgaaggagggcgactcgaggtcggcgtgaccggccgggattcgctcacgttgaaagcttgcgagttcaggtgagtgtgttgtatggccgagtaaagaacatcgaagaaaaagctcaatcccgcgctacgcagttgaacattttgaatagggacgaaaagttcttgtatgtcggtcccactgtagcgtgagaacgcgagctcctttgccaggtagtgttcttgccctttcagtgggccaagtccagctgcactgcttatgaacttttctcgaatgcaggcacctgtggtggcccatttttcgagattttcccgcttcttgtcagccttggcctgttcgtcgaacgatgcgctttcagagccgtagactgtagggtctgaatccgatctgtccagctcgagtctttgctctcgtgattgcttgacgtcgtcaaagaggttcttcaagtcttccgtggcgctcatgatgggcttgagcacgccgtccagcttgcgcgtaaagctagaccctacgctctcggggaaaacaaagatcgagcagacaaccgcgagtccgagttgcatcgacattggctgcgagaatctttgccgtcagcaagcattgtgaggcaagaatgagatggaggatagtcgtaccagcatgaatagcaatcctcttcgatcgcgtttagaacggatgtcgatgtcagcgcatatcacacagctgactggatgtctgcttcactcacgacgtcagatagctgtatggaaacaggtgcataatggtcaacgagacatccatcagaacgcaacccaataccagggcaaaggtaaaaggagcgggctgagtatggatctttagccaggcctacaagtggaaagggtaaaggtcagctcgaacccgcggtttccgattcatatcccaaatcgacttgcgtagaatgcacaaccaacgcccagaaatgcggcacagatgatcgcaggcccagcttctatgtacgatccctcgaagatgatccgcctgttgtactgggtcgggtccgtctgctgcaaataggcatatttctcctggttcgcctgcaaacgactttggctaaagtctccggttcttgctcgatcgacgcaaagcccggcaatgacgacccatccccaagctagaccgacaaagaagaaaaggaagaagatctgttccatcgcttgaatgaacctggcgatagcatgacaggttagcgtttgccggattagtggaaaggaaagtgaaggacaattcacgggaggtttggtggtgcgataaaagcaactgatatcgacacgacattcagcccgacgcagtcatgaccagcagtctcgttcgcagactaaccgatcaacgcaaagaaggcggcttggcccatagtttgctcgacagggtagatcaagaggaacaagaatccgatccaggcctagacgcagctcaatcacttgatcgtcctgtcgaggagtcatgtcttactactcaccgcaacggcacagcggatgaccggcttcatctcgttccaatccatcatcttggggtatatccaggccacgtgacggttggcccagaacgctttcaaaaacttgtccagcgctttcctccagagaggtttcgacttttccctctgtggttcctccggtccgtttgcttctctgggcggtggtgaaatcgagatggaatcccttcggggtttttccgtgctgacgtttgcagcgggtgaagccggtcgaggtgaggctgtccttgttttctcttgggctgcccagatacgctcattttcggccaacgagggttccgcatcggacgtcggagtgtgcactctagagctcctggcatgggatacttgaacaggtgtcgaattcaagcggactcgatttccagatctagacttgggccggtttttgagcttgatctcgagctcggccgccgtgtcgaaagattcggtacggtcgagcaagatacctccactcgcttctgtgcgcaagtgagaggggagcatcgaggagatgctaggctcggggactgaaggggtcatctccatgtccctgtcgaatctgcctctttgaggcgaaggctcctccatgttgatgaatgggtcactcagggttcgcatagcaggggtccaaacagcgcatcaactccggcgcgagcctgaagatattataggtcgttgcttcaaggtacagcttctaggatgaggtaggatactgcttgcatcgcttgaaaggggggcgatgcatatccatatcaacttttgacttgatttcgtcagacgtcggttctgccctccggaagctgatggaagcaaaaaccgcgcgatcggcccgagccgaaaaggtccaaccgaattggaacgacgttgagggcgtttcaattggccataactctgcaaataaaatgggtaaaagtcaagacaaagatcgtaaagggtcagacatgtaccgagaaggcattctgctaaaaagaatttgaccagggcaaaaaacaaaaagtgtggtacccatgaatcgaacatgggtcctctcggctaagcgacgaatcaccacaacgagaagtactaaccactatactagtaccactttgatgagagtgataattttgtgaaaatacatttgacatttcttgtccagctcatctcgaagtataaggttgaagttcagtttttcatccttctcttccccactcaggagcgcagcagggacttgcattctacggctctatacaatccaatgtatcgctactgaaactggacgcaaagatgcgtctctggccctgctatccgtctcgccgtctacacctgctgcacgttgccaagcatctcatcgatttcgtcaagattgctcgacctcacgagattggccttgaactagctcgtgatggtcacagtgaacgaatccagcaggtcatgtcgtacagggttgacgaatgtaggataattgacggcagagaggtatacatgcggctctcaaccctcatcaccttgaggtgggatctgttgttcatcaccaaatggtcaataactcccgccctgtctggagatgagctttgagcccttcacgatgccaccttgaggatggtctcgctgaaagatgaggagcacaacacgatctgctacagctagaaccagtgcgccacagtcatcaaagatcgttccaggtggatcgcgccgaacgtcttggccgaaggtgaggaccacaaaagaggcaatcgtcatctatagcagcgagtccaagggtctcgtcgcgcttgtgcctagccattcgaggaccccctactcgtattcatgttacgaatcgctaaatcagcttatatcgtcgaagatttcgctgccgcgatcgtccgtaaggaataaaacatgcgttgctcatttgatcgtctccagacggtcggggcctgcattcacgtcattcatatgggctatccaggcatcgatggtggtttcatcgatagtctcgaaattcgtcgcacaacaggtctcttcaaggacaaacgtacacttgctgcccgggtaacggaccttccatcgcgcccaaaaggcgcgccacgagcattgccctaactcgagcttgactacgacgaacgaggagagaagcccttctgattttgtttccagcccgatcgttcctatcgacccatccaccccgtttcgctatatgtaccgagccgatcgaactgtggcataagtttaaagcccgattacctgctgctgatcgcacattccgccagatccaggccaaagaccgtcgaacactgtggaactcgacttgacacacctcgtccatttcggctatgccgagcgggacatctgtcgacatcactttcatccgatgccgagttcgtcgttatacaacaaggacaagtcccaacacgacgccctgaacgcccccccgccccgcttaacctctgcgggaggcccgttccaaagtttgccagaaagcgctaacgaccggtcgatctgtatgtcgatgtttcgggtcgatctgcagcggtgtgtgttcagtatctctaacggtcagtcggagcaaaagggtgggtcgcgtgtcactactgaccttgaagagcttgacgttccaatcctttgtcgccgggtgttgaggttctgtacttaggtgaaagtagatgcccaagactgtccggtaccgtgaacgccgcaagagcaagaccgtcagcttacgatcaactgacggtgatccccggttgctaggcctgacatgcttaccattccggaagaggtccttcggatctgtccatttgtacggtttgaactgccatgcctgacccgtagtgaacacgcacaacacccgatccctatcaccccgatcggatgatcaggctgcctgtccgacttttactgaccagaggactggatccaggctcgactcaccatgcatcacctccggccgcgctcccgagcttgtgtaacacgtcgacgctgtcgatcgcgtaatacttgatcttcttttcctctacgaacatgatgatcgcccatcgacccagacggaataagcgtgcgtgttcggccagttcagcgggagatgatagggtacgaggcggaagatgacggacgaccgtaggggaatggtgatgacggtgacgacgacgaggaccattcgactcacctccgttcggcatggacacttttcggtagatcatgaccacgtcctccatctttctattcccctctgcctgctgcctcgccttggcctcttcgttcctctcaaacctgcgagtcggatatctcacgtgtgatcagctcaccatccctccaacatcctctcttgtcatccatccatgacccatcgggtgggcggaccagaccaagcgcacggcacgggcactcactctccctcttccaacagcctcttgacgttccacatggtgaccaacgctgtcgggctagaagacaagacgatgatattctgctgcatactcctctgcttcttgttccccctcggtacgtccgctgtgccctggccgcctttctcgttgttaatgtgattcgggtccatcgacgtgggtttcccctccttggcccggttgacgagctcacgcaggggtttgatgcgttcttcgtaaatgttactccggagggtcgaaaagtcggcttttttaccgggggggaggtgacgcagggggtcgtacatgtcaacatggggtttctcggtgacggattggagctgccagtcgatggatcgtcgtggttcccgtcaggaatcagagtgtacggctggaagaaagacacgcccgggctcacctttttgtaaaacgccttgtccgtctcgtctggcacgtagcgtcgtttcgaagggaccgccccggcgccgttccctactgctgtcactgcctgggacgtccctgtcgtatctaccggcgttgtcgttgttggtgcttgagatccctcgaattctgcgatccacaaaagatcgatcggtcgagtgagccgaggtcgggaccgtcgacgactacgcacgacgggtcgagcggagagagaggaacgacggcccgctcacgtttatcctcgggtttactacccgcaaccaggaccctcgctaccggagcttctcctccactcaggtactcgagtacgatcctcctatccaagatcccgaccggtctgaaccctgctacgactccgctcgctgcttttcgcatgtaatccgcattccccgtgtcccgctccaggtaggtatagagcagctgttgtagcgtcaagaggttggacgtgtcgttggcctgtgatgtgaaccgggtaggggtcgtgatgggtagggtgatgggtgtggatcccgaagcggtagaggtgaaggggaggacgacatgagtagcgtctagtgcttgtgtcgtcggttgacctgacgaatcggtcaatgtgggtgggttcgaggtcgatgcgatcgaagctcttagcaggacgagcgggtcctcggtaacgtcggtcatggtttgtttaagagagagaggtggagtccctctcgacaaagcgatgactagttgtatattgttggttgtctgttgtcggtgtccaagagtatataggatagggtctaggtctaggtcgttgttagctagcttagttcgttcgttgggttgactttgtgtttacagtaattgcgcgtcgaccaacgaacaaccgcagaggtcgagtcgagtttcaccttgggaccttgatccttgtatcatcaacaacatataacagcaagtacagcaccgtaacacaacccgatatcaggttgaaatcgatcctcgagctcttgcatatcgtcgatgtagtgacaggtcaatcaagggggagtaggcgcctaggtcgacatcaaaatcagagaaccgcgggatggtcgccatgctggtgatctttcgtcgcatgggaggagccatgatgtcagatatattattatcgattaaatggacacgacctcggtccttgtacaactagattacgacgacagacgagatcctcaccccccacgttgctcgcggtcttctcgccatcccgaccgatctcaacaagtccctcctcgctctatcgaccggcctggaaccacctccagaaataccacccggccgtacccaccgccatcgtcgtcgccaacgccctgaccacgatggccacgacgagggcgtgcctcaccgccgagtagaacgctgacaaggcggccccgctccagttgactctgagaaacgcgacgagaacgggattcggatggggttccgaggagatcatcagtccccgctgccgtaccacctgaaggggggggggggggtacggcgaccaccgagatctacaccgtctaattcgtcggcagcgtcagatgtgtataaaagacagcgctcggagaagtggaccgtcgtctcgggtacgagagtgacacgatagagacagtagtgaaaaagttgggaagaacgaagaacgaaacgacggagaaagacggggtgtaagacgggaacatttgaaaaagaacggaaagagggggagggggggggacgccgagttggcaatgaacgaattgacaagaagcgacgagacgtcgggatcgaagccgcgagcctctcttttgctgacgccgtggtctctcttaggtactctgcgaacgggatcctgcagatgctcgatcgtaatcggcagatcaagcttgccccagagaaatggcacgagactccggacgtgttggccgacgtggtgatcacgtgtgaagagaggtgttacgattccgtctgcgagggtgagtcgagtgcgcggcgtgagcgaatcgggcgagcgagttgatatagactttgatgtcgacgtcgacgccccgcccacgccctagatttgttgaaccggggaggtaaatcgaaccgacccatccacgtgatcaacgtcgagatcaaggataatcacgaagaagctcgacatgcgggcaaggcgatcttgttcttggcacgatcgattgaagagtcttatgatttggacgaggagatggattcgatcttgacgaggcaggaggagatgtttccgcacgtgttgttgcatacggtagcctttgtgtgaggcgcgacgcgtggggtggtggtcatcgtttatcatgtccgtgtccgtgtccgtgtccgtgtcgatgtccgcgcggatgattgggatgtccgcttttcctttccaaccaaacaaatgtcacgatgtccgtgttttcctcttttgattctgattttccccagccagcgaccgacgaccatcgaccatcttcttcagcttcatccaaatcatccatccgatatctatcctccaacctcgaccccggacctacactctctctctctctcttcgtccgacacacccgctcaagcacgaggtacaaacacaaaagagctagaggttaccatctcgtcgaattcagaagcagagaaagaaacgcacgcacgctcgtcgtctttttcctcttccctcttctcattcgtccagttgcccttaccccaagaccctagctacccctcgtccaccagcgtataaaaacagcaaaaaaaaagaaaaagactttgaacgaccagcaccatgtcgatcgtcccccaggaacaagtcgctgctatgcagcaacaaggagatttcgccatcaagagttccgacgtcgctgccaagctcggtcagtcccatcgtccccaccgcctgcgagatggacagcgagagacagacgctgacccttcctgcctcttgtcctggcccgcccctccccggtagacacgtcgcaatggcccctcttgttgaaaaactatgaaaagctactcgtccgttcttcccatttcacgcccatcccggccggatgcagccctctgaagcgtgatctcccgtcgtacgtcaaatccggggtgatcaacctggacaaaccctcgaacccgtcttcccacgaggtcgtcgcctggatgaaacgtatcctccggtgtgaaaagaccggacactcgggtacgctcgacccgaaagtcaccggatgcctgatcgtgtgtatcgaccgtgcgacccggttggtcaaatcccaacagggagccgggaaggaatacgtctgtgttgtccggttccacgacgccgtccccgagggtgccaaggggttcgcacgtgggctcgagacgttgaccggggcgctgttccaacgaccccccttgatctcggcggtcaagcgtcaactgcgtatccgaacgatccacgaatccaagatgctcgagtacgacgagaagcgtcatttgggtgtcttttgggtgtcgtgcgaggccgggacgtatatccgtaccctgtgtgttcacttggggttgttgctcggcgtcggcgcgcacatgcaagagttgagacgagtcaggtcgggggccatgggcgagaatgacgatatcgtcaccatgcacgacgtgctcgacgctcagtggacgtacgataacacccgggatggtaagtccgacgtgtgacttttggtttcgacccggggcgttcaatcgatcgctcatcgtcgaccatcccgtctcgcagagtcttacctccgacgagtcatccgacccttggagtccctcttgaccagttacaagcgtctcgtcgtcaaggacagctcggtcaacgccatctgttacggagccaagctcatgcttcccggtctgcttcgattcggtaagtcggcatcgacccgacacctctctttcttgacgtcgacctagttggctgacaccgccacctcgcgcagaatccgacatcgagctcaacgaagaggtcgtcctcatgaccaccaagggtgaagccatcgccatcgggatcgctcaaatgtccaccgccgacctggccacgtgcgaccatggtgtcgtcgcaaaggtcaagaggtgcatcatgaacagggacctctaccctcgacgatggggtctcggacccaaggctcaggaaaagaagaagatgatcaaaaagggagagctcgacaagtacggtgccaagatcccggggaccaccccgaaggattggtccgaggggtacgtcgattacaaggaagacggcgtcgtcacgtttggaggcaacgccgccgggtcgaccatcgcgactcagccccaagcttctacgtccgcccccgtcgttcagacggccaccgtgaccgaggtcgtcgaggtcatcaaggacgaggccgaggacaagaaggaaaagaagcgaaagaggaagagcgaggccgccgccgccgagggagacaagacggtcgatggtgccgatggcgagaagaaaaaggtgagagtcgtcgcgtcgggatcggttttccctaaaacatcaaagccccaaaaaaatcaactcgctaacgtccccccggttcgcagaaaaagaagaagatcgaagccggcgacgtctcgatggccgtgaccgagggagactcgacgttgaaaaaggagaagaaggagaaaaaggaaaagaaggaaaagaaggagaaaaagtcagaggcataaagcgttcgcgcgcgatattcgtcctctcctctgtttcctcctttcgtctgtcggtggatcgtttcgacctttgcggccggagccggttcgcgacgtgtacttcttgcgacgtgtaccagcatgacatctatgatttcgagcgctacataagatcctgtacattcgtcgtggccgacgtcttttcgcgcgccaaaatccatagacgcggagtccatctcaccctgggagagggtttcagactgatccccccgaacgattcgatcgattggaccacgtcccatgcagattcttcgtcctcgagaaacgactcgacgtcatcggtaacagtgtaaccgaacccggccgaccagatctgcgacgacgtctctaggctgtcgctttcggtgcgatcaaagtcccatcgtggaagggcatcgtcgggctgttcaaacgtgtaccgcgatgctcccgtctgtaacacgctgggtggcaagaagacgcgcaggtctacccgttgattatctgatcagtacctgtcccatgtaaaaatctctgacctgctcacctgaacgacccgaagtcgcgcctatccgcttcaaagcctcgatggcctcgcctcccgggtaattgttgacgctcacaaacgtcaatccgatcgtcaccatcacattggccaacagaccgccgatcaggatcaggcctccaagcttatccacgatggacttgcgattgatggctcggtcccagctatgaagatggcaaagaggacgattgagaagggatctgaagcaaggtcgatgatccggactcacattcgcgaggcgcccgtggcggccagaacgttgaagagcgggaccgcatacacgatgaagcgccattcctatcgacacgccagagtggatgagccccggatgattcgctcgacatcgttcacacgggcaaagaccgcaccttgtggcccaagaggctcattccaccgaccaggctgacgatccccgtcatggtcattcccctaaatccacttcccgctcctgataccagtgcgtatatcgccagtggcagactaaacagggtgatcttgggtaaatgaaccacgatgtaagaataccacggcgagacctgcgatacgaagcgagccgccctacccatcagtcgccgggtcgacatcggacgggtcgatcgaccccagtaggttccaggtcggatcatggactcaccccccacgcttcgctctttccctggacgacgttgaatacgacagcctccatctctggccacgtccatctcgcccagaagaggctatccaccagagtgctcgccaacgcccctcctgcaccgccgataaatcccgcagcgactagcctcgtgaggggttctcggcggacgagtagcaggtacaacgctagtgggcccaggaggagggctagttccgagcggatgatgctgctcgcaagggagagtaggatgatggctctcgaggtcctgcttggatcgccggtcgtcaccgagggacgaccctgggattccaccaggtagccgagtgcgaggttgactgtcgggatcgcgcatatttccgtcactctgatgagcgggtatccatggtgtggtcgagacctgtcggagctcaccgatgggcagggccatgaaattcggcagaggtcttcccgcatagaacatggtatggaattggccgacgctcagtccgagaaaaaaaattacggtcgacctgtctctcgtccttctacccagcgcttgggacagtcgaatgaccgacaagccgttcgtcaaagcgaggacggccctcactactcgaaagaacagctttagccttagtcgatgaaaaggtcgtcttgacgtttgcaggtgcactcacgtagaatctgctcatcgagacccctcgtaatccaaccgatacgtcgaccgatcgagaggagaggccaggagatggcagcccagacgatggatgggatgaacgatctcggcacggccccggggaacgtcctatgatcgtactgtcaccgataaagtcgagatggccttcgatgagctctagcctccttgacgatacgaatggcgatgtggcggctctgacgtacgactgacctgttctatggcatgttgtgagaagaaaccatgttcgagcacatcacgcgctgcgtgcaaggtaaagctctcttcgacctttgtgtacggggcgatgagtacgtagatgacgggggcgacgaggactagagcatggagtgctaacgctgagtaccgcatcgtacgagttcccttcaggcggttacaagctacaaggaaggcaatcagccgacgttggtatgacatacatcatattatcacagattagtagtcgaccaactactggatatgacgaacgaggtgacgggtgaaccgagttgatcacgtgattgggcaaccgaggaggggacgaggtcagtcaggtaacatcaagtcgtttatctgccaagtatgcaagtcttttctggtgtgaccacgggataatttaggcactcgagtggagtgcagtgggacatgagtcgactgcatgaactcgattgtgtgcacttggtcctaagacgatctcggtcgcgaaagaggatatactcggtgacgaatagcaaatgtcaattgtgcctcgctgtgacgtcgattcgggcagcggtttgacgccagggacgactttacgagacgtttaagaacatttgagcagcactgggcgcatcgggcaaatctttcgaggccaccgagtttccgatctgcggtcttttgaagacctgcttcgcagtaacgtcgccatcaccagcactgacggaccctctcgaatccgtctcccgaccttgttccccgccccgggacagagcctggcgaaattcgcatctacgcgaaaagagaggtgtgattgtgttcattcgtctttacatgtatgctcttttgaggatcatagcacgaccatcgacaagtacctggtgaccacagaatccaatccagaatcagctctacgcaccgaccgagcagacgccgaatcgtaacgccgaatcgtccgacctgcccccggactcaccccaagatcatcaccgagcctccgagcggggtgacgggacccatgatcttgcccattttttcgcgtgcgaggacgagcgggaagatgctccccgagaacatcaatgtccctgctgcgatggccaggctggggaacgccagcctgccgcgtccgctagagaatctggggtggagggagatggccaagagggaaacgccgttgaagatgaggtactgcgaggcggtggaccaggactggacggaaaagggggagaggtctgggtatcgggatttcagggcatgcgaaccgaaggctagcggtgattgtcgattgcacagtcgcagcgcagaggtttcagtgacatggactccatgtcaggggtcatctcattccgtacgcaccaccagtgatgataccggaagcagctgagcatgtcgatcgcgagcgaatgatcaatttatacgcccgaggtcgtatgcatcgatcggaggatcatgtagactgactgaagagagcgccggtacgccagatgatcgaggggttgacaaatggcattttgttttgagagttggtgagatcaaggattcactactgtgctacttgtctaggctcgatgcgatgtgtaagtggttgtatgcaagatgttcagaggtagatggatggctatttgtcgacgatcgatctgaaaagccgcggtcgagtttgctctgctcaggtgacgaatatcgacaagccgagcgaggggaaatgttgaaatggacgatatacaagcatacactctagctacctcggatctccttgatcatcccccctgacagccctcacatgtacttgctggaacagttcagtggacatagctttggaggtatcgtcgtcccaagtaccaagtagcagctggacaaacccaacattgaatcggctcgtggttccacgttaaatcaccggataggctgtgccgaggaaagatcaacgtgtcctttctcaagagtcaggacgattcgtagcaccatatccaacacatacaccttggagaattccaactgagaagcatctcatagtcctccctcgatattaccaccgagacaccaatatcgccgctcgcacgctggcaaacccagaccttgaaccatgttcatcagcttattcgccaaggttgtcaggcaagtctctgcctcctctacttcatcctatcacgacttgcattgtactagtactaaactacagcacataccttgcagcaacgtcgcgtgctacctctacccggcttatgcatcttacaaagccctgtccttgacgcctgttaacagccaagacgccacggtccagaccgaaagatggttgatgtactgggccgtcgtcggatgctggacggcgatcgagagcgtggcctggtggttgctctacgtgtgagtcgtctcttccacatcattcttggggtcactaggacgtcatcgcatttcgccatgctgaaacacgatttccggtggcgggagtgtttaggatccctttctactcgttgatcaagtgttccttctttctatggctctcattgccgcagttcgaggtcagtacggcttcaatccggttggctacttcatccttgacaaccgacatttgtgcttgtccagggctcgacctacgtctacaatcaattccttgcacccgtttttgccgaacacgaatacgacatcgattcctttctcgccagtcttcaaggtcgggcgggatcaggcatggctgctctcatcagctgggcctgggctcaagcgagatcgcacctcaacgtaggtttggattcgaaccgatcccaggaagtctatgctcagctgacgaccgattatgaatggcagttgcaagcaggtgatcccaatacccacgctcagagcggccttcaaagcggtcatcctcgtgtgccatcagacactggtcctcagccgcctacgatgcacgatcctgcctcgggcgtaatgaggcaagctatgggcctcgctacgagatatgcgggaaagtgagcgcttgtcgttgcgtttgtgtcgcaagaggacgtcgctgactcccgctcgttacctacatagctacgcaccggtcatcgcactggcttggcagaacatgacggcagctagtgctcgtgtcgaacctacacgccgagaagtacgacccgaggaacagatccaagggttcgacgtcggtcccgccgcgaccgccacgactccctcggcgagtccacgctacccgaccttccctcctacgccaccctttgcttatgctggagaacagagttctcaagcaatgcgacaggctgcctcgcaaatgtttacttcgagtcgccaagcgcctcaacagaatctccatcagcgtggagcgacctcaccggccgatcgcagcactcccggttcccgctcatcttcgggcgaggatatcagacctggccgcgtcagctcacgagggtcggggtacaacagttggggagaaacgtctactttcgagcaggtcagcaaggatgacgtggcgggatttgaagcaggacctgagcggcctcgaccgagcggtcggggttcgagctggttcggttggacaggagcgacgcctcccaagggcaagactgattgaccagtttcgttcaccgattatgtgtatcagcagtcgtgtatgtgtatcaagcaattgtattatagctcagccagaccgtgcatcgtttgaaatatgcagctcaaaagcagcttcagcaatccgtctctattcgctgagatagatcccaaatgtcgaaacggatgacttcgtgctgtcaagcggcgcccgggagatcagccttttgttgaacaacacactttcgatttcacaaactgactttttgagaaatccctccggtcgaggcggtcagacccagcagacgtttagcgctgttggcgatgccatgcgtttcaggcaatactgcttcccacaacggcaaaacttccttgtcaccagggatgatgagctccgcttgaatccttcgcctgttctgatctacggctagccttaaagtacgcagttgaccgtcggataatcccggcaacgtgaaaggcggcgtcaccgcgatggcatgacggtgatgagatttcggaggtgagtgaagggaaatatgaggggccggaggatcgttgcagcgatcgactctgtgcttaacagtcagcttgaatgcttgctcatgatccgatcggatgccttggaaggctcacgtctggtaggtatcgatttctgccacccaatcaccgtatcctccaagtccgtcatagccaagtccagctccaccctcgcccagaatgtccggtggagcactcccctcgtgctgaatgcaaacaaaggccattccatctgcaccctggtcttgtccaggtgacgaggatatccggaaatcgatttcgacaacaaatgacgtcgttcgtgcgatcgaagtggcgataaatgcagacccaacttgcgaggtttcatttggagtgagaagtagatggtcgctctcgcgccttgcggaaccagctagccgcagctggtcgcctactgaagtaagcgagtaatccggcctgatactgactatagatcatgttcccgtcaacaagagtgatcggatcgtggcatatatcgtctgggcttaccgtgagcagtgtcgattacaaatgcgcctgtgccggaagatcccgattccgcccgcatggctctccattcttttgtcccactctgtctacctttgtgagtgtcatcggaacctctagccgctcgcagacgaccttcgtaatccgccatccacgcatcttgcttggaatctcgctcggctagatccatctgcctagattcggacaggattgcacgccttccaaaagtgatcgctgccagttcctgttgaggtgtaccataagagatagcacgggtatgaagcctaatcgagtggacccacttcagaaagatcttgctcgttccacttccgtcgtcgctcccaaccttgctcgtgatagtccgctacgtatccagaactgacatcctgtgcaccctcagctccgaaagccaagacgtagctcatctttctaccccaacctagctcgtacatcaagggcgtatcgaacgcggcctcacacgagtccaggtgaacccatcgtccagccgctttggaatagtattcattccacacatgatcttcttggttgtgaacgattcgacaatcgagaccggcggcacggaggaatagcatgaagaggtttgcgaactctccgcagcgtccttcacgagtaaccaacaatttctccggggcactggggatatcggtgtgagattagattttgcttctcatcgaagacctccgacttacttgtatctgggaaatctgcggattggatgcgcaggctcgattatgcatcggtgcagttccaccctccccgctccatagcttcgatcctcctcgccgatttgattgcctgtcagggtattctcgaaacgtgtctccccagagcactccggacaggtaatcggatcgatccacttcataaagctttccttgaaccattggaccagattgagcgcgaggagatcgttttcctgaagcttgaaagcgaagttgtcgtgttctggccttctggtagtttcaagaacagactctgggatatacattctggctgatgactaccgggagatgcgacattctagcctgatcgagcgatcacagaggagcacgacgactgacctggagagcatcatcttcgtacttgtctatctcttgatcgcggccgctcaggtaatctcttaggccaagccttcgctgacccgatggatctccacgctccttcaggaatctcgacaatttcgccaaaagatcctgattcagccagaagacaaggagccaggtctgaaggcggcgagcttcatgggtagtgactggacggagatgccggttgcggcgggcttgtcgctcgatgtacccagtcgcgatttcgcgtgttcgtatatcggagagccccatcagagccgtccgaattttgtcaacgaatttctttgggtatgtccacctcctaagatccccaagaaggtgtgatggaagtactttccgacagcgagagagtcgtacaatgtggtagggtgtagccttgtgtcgaccctcccgaggtgattgagagtggcacaacgtgctggtcaatgacgaatccatgctcggaagctattttgaatcaagtcggatgtaaatcgtaaatgggcttcctccttctggctagaggatgtacatcgttttgaagggatgagtcagaccagaccaaattgggagcaaaggcaaaggattgtggagggatgggaggcaaaaaactgtatcccatgagggaaacctgttccaaagaaggaggacggtgaaggaggcaaggaagacgagatctcgtccaaaggttgaaattggagaaggtcaagagcactttgctttctatagaaagcggccttccgggaatgatgccttttgtagccttttgtataacgcctttctcactgtttatccctggatgtgtaaaattcatagcctcgctgtgatgcccaagatatggatgagcggtgggtttaggctcccgagttctttttcgtcagatcatcccaacttgttatgttgggaaacggtactcgataacgcgcctttgcgtctgtttggctataggtgcattcaacacttttggcgggagcccagcgctgtgtatctagtcgtcttgcttgtacacatctcggtgcagtggacagcgccgaatcgaggcaagaatgcacaagatgtcatgaatgaaattatcctgaattgcggtaaacattacaggggcaatgagagctggatcgcgatgcgatcgcatcactaagacataaaagatcgtgagaggcatgaggcagattattttcaagctggtgctagagatttctagaatcaacctagtgaacgttatcattctgttgttgtgctttgagaagagcagcctgtttctcgttggcagcctgggaggagtggggaaagttagcgagacatatcgctaggtgattacatctggcgctcacctgggagatggtcacgtatgccctagcaggcgacttcatcccgaggtcatcgatctggtctcgtcccttgctctccccgtcgggatcggtcacgatgatctcgtggtcgaaaacggcttgcatgatttcgacatacttttccgtcttgcagaactgcgggattccgtcaatcgacctttgtcctcagtatacagctctcctttacggcttcgcctgccggacttacctttggcaccgagtccgtggccatcaatcggaagatataactttggatcctctcgtacagacgaaccatggtctgcagttgactagcctgaaggctcttcgcagccaaggcgggatccaaagtcccgtgcttgacagcctcgttgccttcacgcgtagacacctccgcaacgatcttcgacatgtacgagaccagctcttctcgtagattgtggtcgatgttcagctcgcatgccgatgctggagcaaggtaagctggaaaggcgcgattttcatagtgatcagcggcggattggctaattcatttctggtgggaacacgataccgactgttgtagatgacaaaggccatggcgatcaagtcctgctggtggcgctccatggcagagtgtccctgtgtcttttgggccggtcctttcgcgaccatcggactcgcaaccgctgagctggtcgtatggaaacgacgtttaaagtcctgtacatccagccaaaagctgagattctcttcgcaaaagttggcccggagaaactctcggaagagagatctaagcgaaggttcctcgagaatctgcttcaatttgctagtatgtgaatccttgtactgatgtttgtcgtcgacgaccacccgattacctccgcttgagttgatgtcgagatactccagtcgtaatcgatccactagacttgtccgccgtatcatccggtcgtcggtcgtggacgagaggctgcgtgtcggattacgcgccgtctcctgcacatcctctgatgaccgatgaggctcgggcgaagaagttttgccgggctgtgatgtcgacgaggcaggcatagatggccgattctgtccttcggtccatttcgcccaccggcgtccttcgggtgtgactttgtagtaggtcttctccgtgaagcgaaactctgcctcgctctgctgaaaaggcaccgcaggttagaagataccagcctgatgatctcacatccttgactcaccggctgtgtgcctgttggtgccgatgccgtccggaccacgacgaccttgctaggatctatcggcctcgactttgtgtccggtaccatcttgatcaacccgtatcttacgaaatgtacgcacatctcggccgcttcgtctctgccgacgatcgtggtaaagtcgcacaaccagtccatcccggctgatgcaaggaagatgtaatcgtgggaaaatgtgaccttgtccttttccgcctccggggacgaggaagaggtgccaggcgaggatgttggcgatttttctcgctcgacgaccgagactttcttcacaatgatcccgaggtttctgtcgggatcatcgggatgatgtccggatcccgcgacgcctcgtgatcgatcatccctgctgccgacgctgagcagtcctccagacctttcatcttcgttccttggcaagttgggctgtcttcccaggaaccgcttgaagatgatctcgatgacggctttaccgatcaggatctcgtcgtcactcgtcctcctctcgagatggagcaatttcaagcagatcgattgggtcgcgaataccttgagcaagtgttccgcgctgatcccgttcttggtgatgaaccgttcgaggacgtgcagacccttgggcgtgagcatgtagattccacgatccttgaaggtcaggttgtcaagatcggtcgcattctcgatcaggcgtgtgtccatgaaatgttggcagattccttttgccatatctcgagtcatcgaaaaagtcgttgtagtcgtagttgtgacgatgcgtgatggatcttttggatcgggcgaccgattcgactgcgagaatttcagtgaagccagattggtgcacacctcgtctctattgggatggcgtgcgaggcatgtcaatcaaggcgtcagaagtggcacgatctctgttcactgacgtgctaaaagagttttgatagaccttgaagagtgaccggtggttctccagtcgaagggagacgatcaacgtcgcgaaaaggtcatgcgtgtcctatcatccgaccctccaaaacgctcagtttatccccgcactgccgagagaaaacattgcgtcatactcaccttgacaaacggcctccctcgtctcgtcgtcttcatgagatggctcgtgtttgccgacatctcgacttggatcccgtctctgatgacgaatctcggcccggtgtatggcgatatcgcaggcggttctggtggattgacaaggtcccactccggttcgtgaagaggactcgctgaagattcgcctgcggtgttgatgggggagagcggtgtttccgatctgataaagggcgacacgttgatccgaggatcgtcgatcagactcgagtcggcccgtagatgatcgatagtggcgagattatcagccgtcaacctatcaccagggttttctgctagccgatcctcttccgcagggctgtgactaaacctgaggctactgagttcgatgctctcgctccctcgtccgtaactctgattacgactctgcgttcgactattgctcgtccccgtggtcgaagtaaacgcactcgacgctgtgctcttcaatcgttctaggtctgccagatgactctcgaacgaaccctccgcgacgctactggtaggcgcggatgacggtttcctcttccgattggctcgtgggggtggtcgaactccagctcctgcgcctcgtgaacagccaccgaccttgccagcggcggtcctggcggtccgagttcgagtgctgctggtgagaatagaagagccggtcccgctaccgctgacgagacttcttaggtcggcttcgtctagctcgcgctcttcttcaggagaaaggactcgtagcggggttttgagcttggggtctctggccttgacggtcgcgcctcctccacgggagctagcaccgactgaacggacagatcgggatttgggagccggtggagaagactcgtccggcttggtaacgatgaaggaaggtgtcgggcaggagtcttcgcttcgagtgcgacttggacctggttccgggtcgtgtcgaggttcgatgctggggaaagatggaggaggtgccgggagtggcggatgttcgattagtgtgccagtcgaagctgttatcgacaggaagtcatgttcacatgagcttatgcacaggtctatggctatcgtatacgtttcgtctcctccgcggtcatcctcccctttgacatcgtcaagcaatcaccgttgatgttcctttcagcccgtcgctgcacgtcgacctccttccacatcctttacacgaagaccaccgcttcgaacccgctactcacctgcacttgcaacaacactcgcactaggtttctttcgtattccaccacctccacgagagttgtaaaagacttgctccttcttctccttttccttgttcttcttgtctttgaactttgtcttgttgagcactggcgatccggttgcaggctccgcggtggtggtagcgtagttggtatcgggcggtggattatagactgcgactgatccctttcgacgcaacaacctgttcatccaaggacaatagtattacgatcgagatcgatgccagagttgtatcgtcaaatgtgatcgtaagggtaattagagttgtcgggcgagacgggtggccgtaagcgagtcacgggccacgacgattgatggaggagagatatgatccgtaggtgtacgggtgtaagcagagtaatatacgagcgagcgacgacgtggtatctcgggaagaaaggtaacgggggttatgatcaactgactatgattcgggggatcaaatccggacctttgttgtcgtggtttcttggcaaacgcttgtcgtcctctccctcgactggatgctaagtatgttccccgtctggcgagaggttatcgtgatcgatgcaccacgaatccttatctctaaatatcgatatcggtttcaggtcgtctcttcttctaccgatcctgtcgcggtcgtctttggcgtgtcggctgccgttgttgatcaacaagacaggatcactcggtcggtcgccttcctttctatcgaaggatgatggacgtgatgggtgatcacacgacaggtgttgagtgatgggatacctcggtctaggcgaaacctcctttggaaagggagagaaaccgaatctctcctcctgtagaagtacaccactgtcgctcgatccccaggtagatcccttttgattgatcttgatgggaaaagcttcacgggctagtgaaccgcgaacactgaggtttcccgacgtttcaacccctggacgtcgaaagctgaacgacgacgacgagggcatgataccctcgcgatcacggaggtcgggtacgagaatagaccacacagtctgatcgactgatgcttggcggaatcgatacatgatgggtgggtacggatcttcctgtggcctgtggcctgtggctggtcgtcccaaacgaactgtgacctgcatatcgtgcgtgaaagacgagatcgagttcgattcgtttctcttttgttctcgttcggtcggtcggtcgtagagaacaaaagaggacgagctgtgccatcattcaacaccgagggctctcccaagcctgtatgacaaagtaaacaaaacgggacgcaatcgttcggatccgcggatcgcgcttggatcgtgacccgagcggtccaaccgtcgccggttcagtttggatcagaggtcgatatcgttccggcacattattagcctcgcatcactaccggcgagacttcgaatcattggccatgctgacggggttcctcctatcttactttcaggaatgtctcccatgaccgtaccgtcgagcatgatgggggacgccaatgggcctccggcagagcgacctccaccttgccgtcaagctcggtggtcgatgccgacgggcaatgttccatctagatctaacgttcggctacattattattattgttctcatcgtcgcatattgtcgcgagtctgatctacatttccaaaatctctatctcgctagagaacgagccgaattgcctttgtcgaaagttggcctgcaagtcaccctacaagcaaggtgatccatgcttgtatcctcacgaatcgaggatcgcgcgaggattcacctatgttacaagccgcgatttcgtggggtttcggtaagcagacggcgtttaccagcccgtaatgatgatgcgtcgaagtgcaaagcgactacctaccacctgacacctggcatctgatgaaatgggagacagggttcggccaggacgtttcctcggacgcaatctataagtatcatgatatgcagttggttgtgggttccctttcggggagagcggtgtggcgcgcgatgccgaagagaggccaggggggcggccgtgaccgttcgggcgaggatccaaatatcggggaatggagggggtcgggtcgggttggtaagatcgatatttgtacgtccacaaggactggaccccaaggtctgctcatacggatagaggtaggggtgtacccagatctaagttacatcgacggtttaagaacttgatctgacctgtgaccttgaacgagattgtcccgttgtcctaataatgacctaataagtggccaacttgtatcggtcggcgtctctctctttgtaaaactcggacttgtacgacgagatttgtccgcgcgcagagggaagagagggagggagcaaggcctagggagagagagagggggagagccaagggggtcatcctctctcagtccatattcactccaaccaaccatccatccatacacaccaccgagctcatcatgaatacaccaacatcccggagccacgtctcagtgagctagttcaccgcaattatcgccgccaaacctcgatcgaaaacgggatagatcgaagcactgcccacgacagtctcacgccaagcaggcgatccgagcttgtctcggtcgagctcacctactaccgtccgacacacagcttgaatccggggagagtgaattcgatcgcaactacgacctccccgacatcatcgacatccgatcgctgcaaccacccagcatgccaactccactccccacctacctgccggcctcgtcgccctttgcctcgtcctcgaaagccgctactcctgcgttcacgctcaacctcccgacgcccaggattcaactcgccctgaccaccccttcagggactcccggaccgagcctcactcgagccgggtcatcggggccgacgagcatggccgtggtgttcctcttcgatacgtcgctcggtagggaagcgttcgtcaaggctactactgggtcaggcagcgtcgtcggggggatcatcgccggcctggtcgacaggggaaagaagcgggtcaaggcgacgaggtcgagcaagggcaaagggaagagcgtcggcgacgacgatacggatgggttcgaagtgcgtcgtgcatggcaaatcacacgacgatgaccgatcgatttctgaccagcttgaccttttcctcgtgtttgcagctccgagtctcgatcgtcatcaccacctcgactcgttccggttccatcccaaactttacatcgtccttcctcgcagatccctttgattccaccgagtcgccgatcgtctaccaacaatactttatcccccactcgacgttcctggcctcgctcccactattgtcgacatactttccggtgctccctgtgaacccgtcccgttcgggctcgaaagaggaggatggagacaagatcacgcacgggtttggagaaggggatgattccagatggctagaagagtttgggatcgatgcgagccagccagttgcgggaggatcagaggacaaggtcgtttcggcagaaacgggattgaagggattgttagagggactcgtggtcggtctggaggtcagtgtctcgatatcatcataacaacgagcacacggtccatcccgagctcaccacttgtctattcgcggacgaaagatgttcgatgcaaacgtccgaaatccatttcgagatacggcatcagtgacattctcggaccagacgctcaaggcaggagacaattccgccaagggtacgcccgtgccgaccgctcgaagcgtaggccagcggaacggctcgtcaatggagatgtcagacgagaccgagcggttcttgttcgtcttgacgacacgggatccgactctaccacgacctgcaccggcacggccgagcaaggccggtgagcattcagcggcaccggcctggacgcaggccactacagcagacgaggccgacaggggaaactcgctggggatagcaggcaacaccgggttgctcagcccgagcccatcgcccgaggacggggtgcggcggaaaccggttcaaggatcgacgatggtggctaccaaggagagtaccatgacgacgacgatgaccatgctggacacaccagcagagacggagacgagccctgcgatgatgacggcgtcggcacaagagacacggagtattgagaactggacggcgtgtacactcgtcgggaatagcgatgcgaagtacgatcataccacctggcgcgatcttccggatctctactcggatctacaggttgcagttgctctagtcgagaccacgacaagctccgaacctgccgaggggttgggatcgagcctcgtacggacactggtacggtcagcggaggaacggctggacaagatcaagggggtcgagaaggaatcatcctggtggatggactttccgggaggcacgaccacgatggccggcttcctcaagcacaagtatgcggtcgaagttgaggctgaagtacctaagcctgccgccgagtcggacaagaataccaatggtgggtcaaatgtgtcgttacaacatgtttcgcgactgagcgacgctctttggccgcggttctataggcaagagacctatctcgaccgccgcctctcctctagaacaggaccttgccaacgaagcaaagagattcaaggcagatgcagcggcggcagcatcggcacaacagcttgcaaagatggccgctcaatcgcaagggggtgtagcccccataaatcggaatcaggcaattttgggaggcaataccagcgctgccgcggccgcggtgctcggcttaaatgggacctttacgccggctcaaatctcggccatacaacaagctcgtgctcaacagttgctgaagagaaagcaatcggatgcgcagaaacgtgcgatcgctccgatgccgatcacgggcaataatccggttacgcaacagctgaatgcggctcagctgcaacaggcggctctcactttacagaaccctggggccggccagccaggcggatcgcttactggacagcaaggcgtgttgcagatgcaagctttacagaacgaggtcctgcgtcagcaggctctcagagccgcggcaagtcagacggatagcagcgctaatacaatgcaatctggagccatccgtccttcagctccccagacggggggatccgcccaacctacaaccccttcggggaccccgttgcgtgaagcccccatttggcgcggtcgccttatgtctgtgccagcttcctccgagcagacggactcctgttagtacactctggtagctcctcgcagcccaaactttacgctgatcacctgttctctgctacagcgccttcggtcgtcgcaatgtctatgcgcggcatcgacctcgagacgtacttgttgaaagcttggcctgcattcggtcagtcacaggcattatcgaaatacctgccaaaacttttcaccgtctaatcattttctgaattccacccccaggttcaactctgactctgaccggagcgagacggctggatatgcagggacttcaaagtctcgcgaaacgggggcgatgtccgtttgtggaattccgggcacaattggacagcagtcaggccgcggatatccaagctcaacagcttaacaatcgagccgtctcccaattcgctgccaagctgtccagtgggaaacttgtgagtaacggttctgacgatcgcataaaccgactgagttgaccaaatccctcaatccgatcagatgttcatctatgcgatgggcccgacaccagggggaggtctagtgttggtacctcataaaagtcagaatggtgcagcacgattgctcggagcttgcttcttcgtgagtgcggtctacgcataacgcatgactcaaggaaaactcgtctgacggcccggacgtgctgttctagaatgaacccatccctgcggatctcggaaccgctcttaccgcgccctcgacctcgggaacccctgcgactggtcaggctcgcttgcaacagccccaagtacagcgggccatacaacctgccgttgttcctatgggtgcccaatcagcggatggacagggcgcgttccacaatcaggtaaacaatggacaggtccagatccagaatcaagccttgccaatgttacaacaccagcaaatcccattgcaacagcaacaaactcaaacaccgcggcctcctggtcctcctggtgggaccggcatggccaacatgccccctcaaatccttgacggtgtccgagccgccttaaaagcacaagtccctggcctcgatgtcaacaacctgccaccggaaaagctggcacagcttttaaaccagctggcaagcatgaagagtagacagcaacaacaacaacaacaacaacaacagcagcaacaacaacaacatccgcagcagcagcaacagcaaatgcaacagcaaagtcagacaaacatgtcacagatgggcgacgccggtatgaatggactgcagcagaacatgtcgcagaaccaaatgcaaggcgtccgttctggcagtcaacagcagatggccctgcaaatggcgatgcaaatggcggcgcaacaacagcaacagcaacagcaacagcagcaacaacagcaaccgctgagacaaatgcaacctcaacaacacggaggaccaacgggttttgccaatcagttacctaatccacacgaccccaacaattatggcctacctgctggaatgggtaccaataacttttatcagtaaagggaacgcccatcataccctcgcttctttcacgccttccctttacgacccgctcttccacgtcagctgttctcgttgcttcgcactcggacactgcttcaactataacaaaccacatcgcgaaatgagacgcgaacgcacccgtcatgaccgattccgaatgccatattgttgttatagacgatactcgtgccgccccttgtggctttcaaaatagatatgacgctatacttcttgatcttggtccagcccagatgtacccttcattacgcgttgcaatcatacaacgatctattttccaattcgagttagaattgatttcgaggtagatccagcccattctcgccgccactaaagttctgagttggcgtgtactcgaacgtgattttgacttcataacaaaatgtatctcctggcttcaaccggtcggcttcaaggatatagaccttgtagttctgtcgccaggtggatcccgatgacctcggtcgcccatcgtcctcgaaacgatttctcggttgtttttccgtctagcgcgcgtgatcagactccgcgtttcacacgggattgcactgccttcgcttgcacaatgtctcaaagggagggatccgagcacaaagtaaaggcaaaagaagcttctctctgccgggcatatcatcatcgccggatccaccggcattcgccgggtttggctctcctcttgatcgcgttagtcacgagatcgcaaggacctcgcgcgccgacgacgatataaagggttgacgcattgaagctctctcctgcgatcatgtgatcggaagtgacacgattgctaaggtgctcaaggtcaagataaactaatcagctggtcttcctgtccgtgaccatttacttcgtcccatatctgcagcgctattagaccagcaagagtgcgtccccgcattgtcgcaggatcgacaaaccatcgaagcgccaagaacgcgatttcaaacacgtcttaacgatgcatttccaagatgaattgtggggcaagaaaagcgggtaggttctacggtatcggttgccccggtgataaggactgataagtcgaaacggatataaaggatgggcatcatttggtaagacgaaatgactcgcccagagctgacagtgttttacggacgaagtgtttttccaggctatgtgctacactcggtcccagacacaagcgaggaccctccaagaaagaagtgcaacagtgtgatgtaccggacgtttgtaccaagatcgcggactcgccgacacctcttcctctaagaaccagcgccgggttattggtcggcgtcgtgcggtgagtttgatggccgtcacgatacagcctctcggtcctgactactttgactcagagtacataatgcccactatgaactcttcgtccacgtgagcccaggtactaattgacctcctcaggcgccgttctccgctaaacccagagaatccacctcaggacgtcgtcaaccttgaaaccagtgttcgcaaggcaatggtctcgatgcgaagcgccggtggaggcacagtctcaggaaatgatattcagaacggcggacaggctaggtggggtttattgctctttgtcgaagcataggaaacttagttgcatctgaataggccggagcagattacgttgggccaagatagtggagaagaacacgcccgagccaaggactgggtggtcaatcaagctatggtcagtcagtacatgcgtcttgctccaagcagaagactgaaacgttcgtctttgccgcggaaggattgggagatcttcctcggacaatatgaaaaccggaatgtcgatcacgatcataattctgcctccgaattagaatccggtaggtgtgagcgctccgtcttcataacatccaagatatgctaagattgtatgaccaccgcgaaggccgagaaggaactccctcggaccgtgctgggcgtcatgtcgctgacgagagagacatcacactgcccggtcatcgctatcgtatggcttctctggatcttgacggtcgagaacagcgattgagcgtggatccggagcgtgacctacttggtggggaggggcttgatctgggtatagatataggagacatgaccgagctggacgcagatgttgatggggtagctggaaaaattcgtcggagggctggaagagaaggcagtgatcaggtttttttgagcgctgccggagtcggagtgccgagttcttcgggttttggtgcgggtggaattgacgaactgcctacagaggggctcgacttgaatctagacggattcggtgacatgtaggtcgaaagcttaccacaatgaagacagaaaggttctgattttgcggtggattttatgtttagttcgaacgacatgccaaatgacgaacgcgaaagaagagaaacttccgcactgttagacgtcgccggcgacaaagtcagttgccgtattctttcgcgtcactgccgggatgaatattataacgtccctcttcctctgcaaagctcgagcccaagaccagtaacggagaccaggacgctgatgagggtggagctgcaatcgatctcggcgagcctgctccacccataaaaagcaggaagaaaaaaacatggcggattgacgaagtgagcttgtcccagatactgtgtgaagtatagtaatcgggctgattgatgattatatcagagaatcgatcttactcaagacgagtcgcgtgaaatacgcgacaactactttgtttcgatgcatcgagccagagaattagcacatcagaaagatgcagacgagcagtgcagagtacaggcgactatgcatttgcgcgagggtcctcttcaagagcttggcgagtgtctttccccatctcctgctcatcactttgttctaacaccgagatctgtttccagcattgggtgggactatcaaagagttttggagaacaataatgacatctagtcgccgtgagagaccggttgatcaagaatctcgcggctacaagcgcaaacacgacgaagagaacgatataccctatgacgatggctttgggggtctgggcgatggacatgacttcggacgaattggagatcctcctttgagcggactcgtaagtctagacctaaaaacagtttatcagacgtaggtccgactgaatcttctgatcaatcaggatggacaagaccattacgagcgcgccgggacccaggacgtgagatgaatggtcgaacggaatgtcgtatcctgctgatttcctgttagatttcatcgcagatggacgtcgaaatggcacgtagagccagccagtacagcgaaaaacgagcggatttcccggtgagcattcgctcttctcgctgaccagttcgttatagcgctgatatctgtgacatccagtgggagctccaagatctagctcgaagcgattttggtgaaggtaaatgatgcatttccggttatacgcgaagtcataacctgacagacctttcgatacatcaggaccacctgggcaagcttccagcatgacgggtaccgccgccagattttcaatcgatacaccactagacgacaggttaagttgcgatgcgcttaaatatcagagacaaccaggttctgatgcttaacatgcttgacagactgagaagacgggcgcgatcatcgtccatggcatcgcttggacgaccgggctctgtcgctctctttggaagcgcgaaggctggatcagacatcgacttggaatgtaaggacaatagggtatggctctggtacctacatcaccaagggggctgattgaaccggttcagtgcctgaactggatgcgatgcaatcccaaaccgatgccgcatcgacgcagaagtccagcttggtaccatctactagcaaatttctcgagtgcgtacttgatacagctctcattctagaattcgacttgacgtttgtaatcttgtcctcagatacatcaagaaggttccccgaaaagatggccgcgacgtttttgatgctggcgatgacatagtcgagttcagcgacattgctcctccagaggcggtcgcgcgaagagtcgccgcgggagcgttttacaacgttcttagtgagtttctatggcgccccccgggtgggaaggccgggtagagtggggtatgggggttatagggtcagatggaaggtggatcaggattccggacgacctctcgatgacgacgacgaggacgacgtcggcgtcaaaggggaggaacatgacgaggaggaagaagtgcgggatcggaccgtcctcgaggatcgtcatcgagctccaaccagacctcgacatccggctcaagctcagagggaaaagatccatccggtctggttggacaagggtcggacggacctttatcgagatttacctcgaggtccgatcgcggggttcgaaaaggacgtcgacggcggcgctggcggcgtggtcgatcggaaagacgagcaagagcggtatcgacataggtcgcaaggtggacgaccccgggatgggaagcgaggtggcgccgcggatcaaaaggtttcccaggtcggtggtgatggcgatggcgatggcgatgcccctgaagagcgggacggggacggggacgaaaatgacaaggacgagatcttcgagtggaggagcgatacggggttacgggtcttgacggaacaggacctgtacgacaacgatgccgacgacgacgacaccggcatcccgccgatcgatgacgagatcgacctcgaagcggagcaagacgaggacgatgaccacgcctttttcgaagaagagaccgaggacgatcgacaggcacggatccaggcgtggagggaaaagaatcggcgtgagaatcgaatgcccctcgataccctcgtcggtgggtatctggaccaggacgagagggacggcgtagagcccgcttggttcgaagggttggaagaggagatgaaggacgatggggattgcaagttttccagtccggtcgaaggtgagtccgaggttctctcgacccagacccacgcgcccgcagaacgagcgagctgactcgagactgtcgaccccgggggcacctatagcttatcaacgcgcgctgacccggttgagaaaagccaagctgtccaaactcgctaggaaacacgccaatgacgacgtcaatcaggaaggcgacgagctgcccggtgacgctgccgacgagtcgctggaagatatcacgcaagaggatatcgaccggttctcccacccggcgctcgcttcacataccctcccgaacctccctggagcgcacaggtactcgcctacgggtcatctcgtcatttcacccgacgaggcggtggcagaacatccgatcccgcaattgttgaaactcggcgaaaggcgatgggaagagatgatcgggaggcagagtaggacgttgaacgaggccgtcgacgagtacactcggcggtacgggagagcgcctccgagagggttcgatgtttggtgagttccatcgtcatggcaaagtcgtttagccggccgatctcaagcgaatcccaatcccgaacgacgtctactaggtgggggtttgcccaagaaaactcgctgttactaccggacgagtacgatcggatccacctcgacctggcaccgttctgggcgttgccgaggacagagatgaggaagcgcgtgagagaggcgatggacgtcaaggaaacgtttgtgctcatcgtcgagaacgggaccgtctcggtcgaggtgagttcgatcacagcaggaatcaagccgcgcgcacaaagtctcgcgatgctgatgctgtccccactcccgataggtcctggacattggcggactagactggggtgggaccctgcctcgtgcgaaagataccgccaggtcagttcgagctgacctcgacggactgatgacgggggtcgctcatcgtcgcttcactccgacagcctcatccgaccattcgctcagcatttgccagacatgcgcgccgtattttccattcacgatcaaccccagatctatgtctcggcctccaggcgacaaagtctaatcgaacttggactgcggggcgagcgtgagtcggcgatctagatcgacgcccaggaaagaatgctgaaacaccgtcggcccgaatgtagacacaaagcacctgaatgaaagtgactcttcggagatccgttgggatcggagttgccgacgcgaatcaaatttgaggaatccgaataagcacgaggttgaccgcaagtatcggtttggatcgtcgcgagtgcccacgttgctaacgtgtcgaccgattcgtagagagcggtagtctggtatatgacacctcggaagcgaccgacatgtgcaagagtgagtatcaaggctgcgggacgaccggaagttggacgctgatcgaccgagccatacctagacccatatctactcgatctgcacggtttcaccgtagaaaaagtacgtcgaacgcagaattgtgcgataacgggtcgatctcatcacagcttggcaatagcgtggacccgcctcgcatcccaaaccaagaaccaatttgatgccacttttcggtctggccaagacttccatcaagtgagtctcgacgaagtcacacgcctcgatttcgtcgtggctgacctcggaaaacaccagctcggatatccttgtcaccccgctggatcaattcgcagatgctcccggctttgatccaccatggcggttcaagcgatcgcagcgagtcgcttgggtaggtcatccttttctcttctcggtcacgtctcctgcgacagctgatctcgtccgactgtgtagcgaggcagtaccacgggaatctcgttcatggataaaagcacgccttgggaaaagtcgcaccggttccggctacacagctttgcccagaacgcttccgaggcagatctcactttcatggtgcccgatatcggaaccgaaggtggtcctttgcgaatgaaaagggaaacggggccgaccggaaatctgtctgcattcttctacgacatgaagctcgcgggcgagcccttgcagtgtagtgaggaagacgggacatgcgatgagatggcgtgagtacccatcgactggccaatattacgaagagctgcaagttgacgcttcagcccgaacgtcaatagaaacaagattgactttgcagaacttcaaccggctgaagagctcaacgactacaagttcttgtttgacattgatggcaattcgtggtcgggccgatttcgacggtaagtcgtagctttgacaaccacacagatgacagacttggcttatctcgttgcgacaagccttatgaataccaagtcgctggtcttgaagacggggatctttaccgagtggttccagccacatttgataccgtcagcaaaaaggatggtgccactcccaagggccgttgtactgaatcgaattgcgattctagttggttctcatacatcccgacccgacttgacttttcggatcttcccatgattttgtctttgtgagtgtatgtgcgtgatctgtgcaaagaggttacttggctgattggtgacatgattgcatagcctccgagggagtcccgaagcgcccgaggatgggttcgacgaagtcgctgaagcgttggccaacaacggggttcgtccgtacgcatcagttggtactcgtcgtgcactgacccgtagcatccttcatacagagatgctttactcgcaagatcttccgggtagaggatatgcaggcatacatgttcaggttatttctggagtatgcggtatgtcaagagtataacgatttatggaccccgccgtatactgatcacgctacatatcagcggctcatggcacctaccgaccacaatgtcgtaagcagcagtcggaactcatcctaccgaagagacttctctgatctcgatgttccgcgctctctttgcccaggactttgtgtttgatcctaacatgacggacgagggtgaggttgcaaggatcaacactcccgaattcttcgctcaagattccaagatttggcgcaagagcgatgaggacgaggtagagtctgtcaagaactaagggacgagagggacctatagcatcatgggtctcggtcaacgttgtatattcacctcataggtgcttcttcgcattaagaacagttccatagcatgacattaaacgcggtcttttgccgcacgtggcgcagggtacaacccaatatgatggcaaccgatacagtaggcggtatgtccattaaggagacgagtaacgacccttaaagcagaccatgtcaacccgattcaagacatctcgacgtcttcccccataccgatccccagttcttcctcatctggctccaaatcttcccaggtaataccatcgagaaagacgtccgtcgtctgggttgaccctctgaacccgttcccgaaacgatcgatcatgagcctctcctcctcttccatctgggccaatcttgccagctcttcttcatccaattcgacctgccctcttccgagctcgacctgttctcgacgacctccctgctcaggctcaaacccgtggtccccttgagcgctcccgctgtgcatgaaaaagacgtcggtcgttggctctgtgaggggggtagacatggggatgccattccgggcgggcgagggacgatacctccagatggtgcccgggatcattgcctgaccggaagacggcgaggtgtattgcttgggtgtctggttcgaggcagatatcatttccgccgcggcctctgcctcttcctcggcctgcctgatgtccatttcgagcacggccggatccgatcccccgacttcccgatcatactgcacctgggcttgatgttcccgctgccgacgttgtttctgcatcatccggcggaatatctaaaggtaggtgaaggtgcgaagcgcatcagccgggtagagaagggccaagacttcgtggtcaaactgttccacatacctcttcgtgatcatcgtcttcctctgtatcgttcgacatgttctcatcgtcctctgcggccgggtcaaacgtccgctgcccgtccgtccttcttctcgacctcatcgctgctggagcgcctggccccgaccttcgcttcgaccgtgcaccttcaccggcctgatcttccctagagagcccttgaccgtctcgattccggacctcgagacattgttgtcgaaacttgtccctccacatggtccccttgactgaccgctcggtcatcccatcgacgctctccccgaacgaagtatacccggaagccgaggccgactgcgagtgtctacccaaggacggtcgggtaccccatcgagcgtgagggtcaggcacgatcgtccgattgctacttgggagaggctgtcgggctcttgcacgggatgcaaaggacaagccggggttgttgctcggtctcagggtggacgtcgaggtcgataccgagcagggagaggaagggggattgttccagtagtgacccccggacgaagacccaggcgtcggtgaagggataggaggggaagatgatcctagaggaggtgggaagaaagcacctccatctcctctgccgggtggaagaggaggggaagataaggggtttcggttcatctcggtcgtgacgctcgtctcgagctttaggtcgtcatgctgcgaatgccggtgctgggcataccgaaatgggttgagcggggacagtggaaacgtccggcaaagacgggaagagctggagggcggcgttgatggtagatttggcgattgggaaaacaaggtggacatgggccagtcccacaaagatgcggaggagggttgtcagagatgattgtcgagatctccgttgatgtctgttcgctccctagtcgtaaatgctcgctatcgcgtgggtcgtcatcggatcaaggtcgttaataagaagcggattgtatacttccgaaaccgaagaggctacagccaaggtgcatgcttcatctccggtcgtgttcactaatggtttcgatactactcgatgatgatgatgactgctcgactcatgcttgggtagtcgagtgggagagagcttggattgccagtgaaccatattcggggaagaggcgcgggcaaagaggacgagtagattctggttcaaccgacattggcggggtattgtcatgcatgtataccagtaaatggcggaactcgtcatgcacataaattacggccagtacatctgcagattagttcaaacaactgcggtcacttgcgagttgacatgatatattgtcttctatattttgtcttcgaccactttgttgccgatccgaatggctagtctctgcgtgaacggtcacgctactccacggctcgccctgttttggtggtcgacttttcatgttcccggaaccgcagcgaggagccccgtgcgtgaaccatgcatatgctatgtgtcataatcttacagtggggagtgtcccgatgctactataatacatgtctcgccatgtcatgccaatcgtctccttgttgaactctgttcggcctaaagtgtagcctcgccattgtcgtcctctaacttgagaacctgatcttctcgccccgcagctttcaccgccgtcttcggttccacctcgaccttgtcggcgacgtgtctcgctactggccgtatgggcccacgtacaggcaggtccaaccagtactttcggatcgtctcgagaagccaagtacgcaattccctgtaagcccgcgtggattccgcgtcggcgttctcgacgtcgctcttgatcaattcgtcaaacgcgccgacgagggcacgggcatcggtcgtatcttgtttcttgtgccaggcgcggaaccgtttgatgctctgtcggagcttgcgatcgatggcggtccgaaaagaaccgtcggcctggtaccggcgaagcagctcgaccgcctcggtctgatatccagcccggcaacgtgcgttgaaggccaccgagatgaagatcgtgtcgatgatggacgggtcgagccgcttgatagccagatccataaattctttcgactgacgatattgacccgatcgaatcaagcccgctccgaccgtggtataggcggcaatgttcggctcgagaccttccagacggagcgcgttcagtgtctttttgcacaatgtcaacccttcgaagcgcatgataccccagaggagagtaatccacatggaatacccgggcttgaccccaaccgaatgagctaggttgaaggcttccagtgccgacctggcatcggatgattcgagatacgtggccatgacctcggtgaatcgtttgctgtcaacgggcacgccaaactgcgtcatggcgtggtagaaatcggtcggccgcatcaacgagatccgatcgttgttccagaggaattgatggtaacgcccgagaggcgaatcttctgcgtgctcgccacgcgtctcggcttcgaccttgctcagcggtgtcacaccgtcgatcagctcacggaggacctgtttgtccagcaagagcgcctgatccgttccactgagcccttctctgaaatgtctgcgcttccgtttccccgtctgatcggcacagagagcgtccaccatgcccaacaaggacgccttgtgctccgggtcagtaatgtcgtaatgtcgtacaagagcctcgaccatggccctggcgatcttttcatccgcgtttacgtcggctcgcctgatcgtccggagaacccgttcagccccttccgtcccgagttccttggccatctcggagatgagaggcgtgaacacggccggatagagctgaaattgagggggacctgcgccggattcgccactattcgagacagtctcgaccgtacattgggccagattccgatcttgcatccttatgcatgccttgacaaaggcgacgagcacatagctcggcacgaacccgtcgatcttttccttttccatgacgtgcttgtcccataatctcttcaacgcgccgacgttgacggcgatctccttgctccccatcatccactcaatcgtcctcgattccgctgtaagggaagccagtgtcatttgaaggtcgtccgtcccgaatccataaaacggcaggatgtgtccgatcttgtcgcccgcatcgactctgactttggcaaacgagtccagcagacgtcttcgggatggacctcgcaggatttgcatctcttccgcaaacaccctctcctcgacctcggggatggatcctccccaacgtatcccttccgacagcgccgtcacataggcgtctgggtatacctcgtaccatcgcgaatcccacaacctgtcccggatctgcatagccagcgagatccgtctcaaggagagagccgccctcaaaccctcggacaatcgcgagacttcgcatcgctcgtctcccgtcgaccgatgaacgtcggactcttcgtagagcttgaccacttcttcaaaccgcccgagctcattgagcgcctgcatttcgattcccctcaactcgtccatgctccttgcactttcctctgcgtccttatccttccgttcgtaactctttctccgaccagaggtgaatctggcaacctcctcccacctctcggcttgcaccatcagacccaggcaccgggataggtcgatcttgttccgtttgttattcgtctcgaacatgtagattgtagcctcggccagatcgaacagcccgtacgtcatcagcccttccatcaaggtctcgaccatccgcgaagacagcttccagtccttgatggtctcttttctggtcggtacggaagactctccggcttgggagctgggcaaccctaatgcccgtcgtgctccctggagattccgatcaataacgctctgtgcgagggtttgcaaccgtcggatgaccttgccccgtagttctggaagattgtgcatctccgggtacaattcgacggcgagactgacgaatcggccgacttgggaataagacagcttgtttagcgagatggacggctcctgcttggaacgacgtttgttacgggatttagctacccggacaggttgccagacgtcgagcatagactccaggtcggtcagatcggatcgtatccgagatcgtttcgagctcgccgatccggatttgttcgacgttgatgatgaattcgacgtgaagttgtcgggtcgactctgagcgatatgttcatcggatgacgtccgggtcgggttttctaccccgataacgacctcttgatcctccttgacggcgagggctacagaaccgaatgacctcctgcccaactgtgccatctccggttgagcccagcgtcccgatcgagaggtaggccggggtgcgagtccaccgggattcatcctccgcgtcggtactggctgtcgagtacgatccaggtcgaccttgtctcgacgcgatcgacagtccgaccaacgtgtcccaaggcccaggcccagtgccagttgagagcctgcactcgatcttcctaacctccgagaaggttcctggacggaaacatcatccagcgatctgagaaccgatcctaacgtcgtggcggaggtagatgtcgaagccgacgacgatgcaggagcgaagccatgagcctggccgacgagctcgactgacggtgatgatgccggtggtgatatcgatgatggctttgttacgatgaccggcaagagatcgggcagggtctcaagaaagggccatgccaacttgacatttcccttgcacgatcggagcattgatcttagcgattccccatgaccccagattggcgtcagctctcggtgatgtttcggaacgccagtgactagacacttactatagtcgggaagcatacgctgagctggggaaatgaacgagacgatcggaagtttatggtagtgcaagggatgtttcgacctgatgccgcaacgatacctcgccttgtcggaagttcgctcgatcgttgcaagctcgcctttttttccgtctcggatctggacacagcaaagtaccaggatcacgtcgatgagcggttcctatccgtgtacaatcctgtccaaagaattcgaatttgaggatcgatgttcgtatggcacgaggttgttgatttctagttctttgttacccaaagtctgagccagaggagagcactcgaggtggaagtgcgaggttgagtcgaagtcggggaatcgattcggatcacgtgattggctctcaacaacccgcgccaaccaaccccaggtttcatcctcgtccacggatgtctacatcgacatgatcgcataatccggtatctatgcacaacgccaaatctcataatcggtccaaatgacacgagaaataaggtctatatgttttggttctgattctgctgcatcggtgaagaggatgggatttcatctcctggggatctcttcctgtattcgtccctccgccacggtcacgcgacaaattacctcgtccataccgttcatggcgcaggaaacgcgaaccactctgaccagtgaccattgggttgatatggacaatccatgagtccatatggcgatcagaggcttgctcttttcgaagatgatcaacaatgagctgggatccacctcgccgctggcccggtactgagtggtctgaggatgcagccgctttggttgcctcaatcaactcgggcctacactttagcgagcgcagccttgatcgcatcgcatattcgcacgagcctacccctgctaagatggcaggtattacagtgcatgaaggcgcacccccgagcatcgtcccaggtcattgattacgaccgcctcattccaggatcaagaatcttgaagtcgaggttgctaacccacgaaggctattcaacaagtaccattctgaggttccaggcgagtttaagcctcgatctggaagggcaacgcatctactacgccttacacaatccattgcttgatacttacgcggtattggtcttccaggcgtggtcggatctgacatatggcggcagcaaggacgattttcctgggtcagactagttgaggtagctccgtcttgttccaccgtcacgcatgaggttatgtcatcgtcagctcaaagatcgaatgccgttgttcctccgtctgaatcatacccacgtactcgtacaggaatgggatcctgacagcctctcatcccggcgaacgtcttacagttctagatctagatgataaatttatggtcatcctaccggtgcaggaagacaatcattacgacgccgaaatggacgagaccgctcctgacaacatcgccgacgggttcgcggaaagtcaagcagttgatggacggatagttgctatagatccaatgcctcaatttggtatggtcgtcgagcaacaccagcccgcctccaccgacaccaagatgaccagcgactcccaggcggatcaaacccaggcgacttacagggtctcgtagaaggccttgggacgtaattggacgactggagagtcgatgaaattgatgatcacttttgacgtcgtcgtgagggacatgacgcactctcatgcgctttatatgatcaacttgtatgtgctaacttacgcccacaagaatccaaaaatcattttggttcacttctccgttccgcctaacggtcgtcgttgagcgcaatgcctcgtcgtgttcgacctcatcaacctgtcatgtctcgggccgccagatagctagtcccgtcaatctggacgaatgcgttgcctgaatggctcgcctttgtcttcttgaagccatgggatcggccggttgttaatgtagcagaggttgacctgaccccaggatcgaaacgggaagaaagtcttgtcctgacttctcgtcaaaatcagaccgaaaaaactttcgaatctgaaaaagcccccttaacggtcatcctcaaaccgacctggcgaaagatcgcgcagctgagtatcggatatcattcgtgaatcacatgcctttcgtgttcgtggatgttgatcatggggtctgtgctccccattgtcttgcatctttctttgctaaagacgtttcgtttgggtagcctgttccatttccctatccccaaaagagttgaccattgatttcgattgatctgagctggttgctgcattgagagagacccctcacgttgctgtgggccactgacagcctccgtacagacggcctcggaagagatgaaacaggcttgatatgaccttcccaacccatagaatttctttaaacaaatttcgtcaattcgctgaccacaggcactccagtaagggggccaggtcaaggtcaagaccaaaattgttcgattagttctttatctctctactcatgctacctactctctaggcatcgccgtcatggcgcctcctcgggcatgaggtgttgcatcgccagatcacgtgattgagcttctgaatcggctggctccgctcacaacctatatgtcacacacagtccgtacatatgttacagacaggttgggttcgtggatcggctgtactccatcgtctgctttaacctgtagccatttataagtgcttgagagtgttctccaatcagacaggaaacttagccctgtagaaccgtattcatgagactcagcttggtacggaatttcgctacgaggatgacttcgacaatacccggtccggtacagagcagcatgcaccgcaaggtgagtcttagccggcaccaggatctaccgtttcatgaatatccgagagttgatcatctttgatgacgtctatagctcgccgagggtctaaatcccgtcttcctggaaattcgcaacgagcaagtcgagcgtcgatcgacagctatcgagggtcctcgctgattctacggctcgcgacagttcctcgaaacatgcgcatcattcggcaatgagagccgttggcggtggaaatggagagacccgtcagtgaacattttgcatcgatcatcactgcctcctcgcaagctgatccgaccatgcttgaccgtcctactcgacgatcgcagacttttccgtaactgcagcttcggcggcgtttgacggtcttaccccgatcaagcggcatcgactggtcaacaacctcctcaaggaagagtttgaacagatgggactccatgcgctcagcttgcgactcaagaacgttgaagaggccgagagggagggtttggtacaggacaagtcggcccgagcggacgtaccgtcttgtaaaggtagcgtgatctgagtcgtgtgtggacgatgaagcaagctggaatgcatcgatatgcatctgttatacctcttcgaattccgatgacgacgagtcttggtgtgcacgcgcaggagagacatgcggacagagcgatcatggggtgcaggtaggtgtgcgctcacgaattatgaatcagtcgtcggcaaactcggacaacgatgacaaagtttcaacccagtgtgacgtcaggtgggaagcaggcgcaagagacagtcctgcaaccttgacgacgacgacgacgacgacggtgacattgaggttttctttgaattcgaattcaagaaaacattcaacatcacggttggtgagacccgtagcatcctcgtcgacacttcaagcacgcggaagagcgtcggcagattctgcttgacagggtgaaggaacaatgccatgatcaggttagaacgacgggccgcaacctcaccacctgggtcacaccagcctcgtcatccagccggacctgcacgtccacaaacacaccctcgttgacgcctcgtgtttccgtccactcgttcatgatttcatgctgtattacaacccggatccatgcgtccgtgcgtgcgggagggaaaaagggcgcagaacgtcgagaaagactcgtccacaccccggggagctgggaaattacagatccttctggcggatcaaagccctacgtgacggtttagttcttcttgggcttcttggctgcgaaggggccaagtagcggaaacgagtgagagagaaacggaaatcgaggttgggatcagctctcgggagaggatggcaagagtgagagaaagaagacggagtgacaaagaaactcacctccgtatttcgatcgggacgctgttcggttggccaccccagagaaatcgagcgcgcctcggacgagcttgtacctgtaacgtcatcaacgtcgacgagcatacccgtcagcttgaccagtacccagtcgagcgaggacaatcgcgatcgggaatgagggtggggaaagccgggggagtactgacctgatacccggtaaatccttggtcctcccgcccctaacgaggacgacggaatgttcctgcaggttgtgcccttcccctgggatataggcgatcgtcgtctcccccgtactgagcttgaccctggcgactttcctgacggccgaattgggtttcttgggcttggtggtatatactttggagcagacggctttcttctggtagcactgttcgaggagcggagctttggagagtttagggaaggatttacgggcacctcgggcgactgaggagagcggagggacgacagtcagtttatcgctctcttttagacgaattaatatgcggacgagtcactcgccttggttgatggtcgcgctgactggtcgggacgaggtaaaagtcctgctcgacaatcgggaaggtccggcgatgcacgaagtcgacgtcgagctcgctgcggagcggagggtgaggccgttaaaggcggagagtaatgatcgtgagagcgacatgattgaccggtagtgggttgaggttctgtccaacggtgagatgggtgtgtaggatcgtgtctatatgaagtatgatgaactgcgaaccttgaccttagtttcggatcgatgacctctctctcatctcggctgcgccagagaaacgcgaggaaaccgagattgcgcttcaaattggaacaataccacacacacatacacatccacgagatggggatcgggtcatcgatcgattcgacattattgaccgtattttcgagggttgtcatcgagtacagtgagaggttcgctacagcgttgcagtagtgaaatgtatgcaggcggtgattgtacgatgtagttgtggtaacaggtcccaagctgatgatgatgattgatgttgttgatgagttttgtttactttttgaaatcaaccaagtcgaccctgcaacacaacttcgactcttcttgacatgctaatcactctaatcgacatcatcccatcctgcctcgatcgagtcgcaaagaaacacacatctgattattagacatgagcggtatagctcccgaatatgcgaccttcttcccgccatcgacgcatcccaacatcccacggtacgcctcgtccgtgctctccaccctcaggtcatccacagggaaccgagggaccgccaacgagctacgtccggaacaacgcgctgctctagccggaataagtgccatcctggcatgcgagaggtaaatcgaatgtctgctggatagagccaagatccagcgaagttgcgagcctgacacagacattccccgtgttctgccgtgtctgttgtctacgacgacggtcgacgatcgactagatacgggaccgaagatgtcacccttgaatacgctcgaaaacggtcagccaccacccggagcatctttcaatccaccctcgcgcaatgtagagatatactcgcttccagccggaccacaccatcaaagtctaaaccggtttcatctgcatcccaagggagaccctccccctcggcgctcctgaagggtagtccgtccagctcgacccctcgtttcaacccgggcgcgaacgccagggacccgttggcgattggagggaagaacagtcccgtggtgactgcacctaacccgttcttatccccgagcgacaaggacaagtcgtctaaaccgactcctaggacgccgcctttatcgccgttcggaagacaacggttggacttgtctggtctgaggaggaacaccaatggtagtactcctgcctcgacatctgtgagcgtggcagacgctgcggggaaagcttcgatcacggatccggggtcgccgtcgtcggggccgttgagcgtaccttccccctttttggcgatgagcccgaatgcgtcttccagccaaccaagggagggtgcatcgcatggcggaccggctagttctcggattgcggtcccgacgacccctaccaagacgaggatggtctctcaatcggacaagattctcagtccgttgaaaggagccggacctaaccccgtgtccacatcggagactgccgtaccgatcgcaccctcgccctcccgtcgcgggaatgcttccccgatgcacaactcgctcttgaaagccaaggccgagctggtccgtcgagcgggattcgcagcgatcgacgaagaggacgaattgggcctcggaccggtcgacgatggcgggtcaccctcgaagcgtaggaaattcaggggtcaaggcgtggatctcgaatccgccatcaaatcatcctcgactggatcactcgtcggtaagcaggaaccggccagcccatcctcctcgagcaagagcaagaaaaagttgcaggatggattacgcgcacgagaaccttcccccgttcgacctacggtggacatgcttcaactcgttctccctcccgcctcgacatccgtctcgccggcattcctcgcctcgccctacgtatccatccaccacccgcccctcacctactcgggcgtggcaaaccatgtcctccccaccgcgcaagatcggatctttgccaagacggtaccttctgccgagtacgcttggggaccatccttcatgatggaatccaaggggggccatgggtacctcgatcgggagctccaggcggatgggaatggggagatgagggagacgtggaaacgattggacatggccgataagcgcaggaagcgagcgatgaagcgaaggagacggctgatgaaaagtctgcaagagggtctggcatggcaggcggaggaggaggaaaatgtcgaggcggtcggcccggatgatgcgatgcgagtcggtggagagcgggatcgcaagaggaaacgagccgaggtcccacggtgggaatcagagttcgggatcggacaagaacgtgccggagacaattctctctcgtggcacgattcgatccgcacggtaagctactattgcaaggattagactaggtttcaaggacctcggggctgatcgggtcgtcttaaaaggctgccaaccatgtcctcgggaggccatcgacagaaggcgatactgcgcctgccacaccgtgggacccgaagcaagctacctggttgactagggctgaaagtaaagggatcgccgtcagggtctggagcggggaaggtgctgaatcgacatgatcgccacccgtctcgtattggagggtctacctttagggcgagcaatcggacatgggtaaaataattatgaaacatgcaacgatacaagggatgttaccgatctggcggaaggccaatatgatcaactctatggatacaatttctaagccaaacgacccctgctccgacccgccacgcgctttcaaaggctgtccctccgtgacgccgctccgaacaagctcaattccgacccggacgtcgcgtagatgctgccatcgtcttgacacaacagaccagccacgggttgcccgaacgttttgccgagtatactgtttggccccgccgcctgtgtgcggatgggctctccagagtacaagtcccatccgcgaacgcgtccgtccgtacccgctgcaaagatggtcgtctcggaggggtcgacggccataccctgtcatgtcatgtcaggtgggaagtgtcagggcaggcgccagccgatcgcgggtcaagctggactgacgagtcgttgtcggtatatatgattcacgtggccatcgtaatgcacggctggtcctgatcgcgtgaagcgcaggtcgaaaagagatatctacggccgtgggaacgacgatctattgagcgtggaatatatgtggtctgctcacaagcctgtccagtgacctacctcattagccattctgcctactaccaatccgcggccacaaccaaatgagttttctaggccgacgaggttgattactggtttcacgtcggagccagcctctgaaatcatcgttccggcggattgtgttctgaaatcatggtgatggatggcccccgatctcagaccgatatatgcttcattctggtaaggggaccgagatcagcgatggtgactttacagaatgcagcgaattacccacactgaccttgttgatttgcttgaccgcgagaacatcgctcttgccctcgatcgaaatggtgcggaatttcccatccggtctgttcaagtgtgaactgtaggcgatcttgccatgtcctccaattgaaatcgcttcgtatctgctgtccatgcaccaagcatccctgagttgagggaggttgtggaaaaaggtcggtctagtcgacagttcgttgtatcgccgttcgtttgagaagaatggagggtattccggacaaagcacgagggcaggtcgaggaccaaagctcaaggcactgtgcgaacgggatgagcatgatacgctcgcgagacctcgaggataccaatactgagcttacaggaaataatctctttcgcaacaaatcccgctgatcttcatggctcaacgaatgacggcgtcaataccctaaagatgtgatagcttaaagacaacgagtactcactgaacccgacaggttgaaagtcttccactgatacctccgtactgcagacccgatacgagggcgcactccaagactcgtatgaccgtcccttatgacactcccgaacaccaattctgcttcagatgcctcgtaacgttgatcgacgatcccgaaagtctcccccgcttcattgcccgtcatgatatgcgtcgaggagccgggtaaagactgatcaagctcgatcaggccaacagtcagcctcactccagccgagagggttgtagattgcacagtaaggaacatacagcaagaaccgtcgctggtgagctgagggtagcgtcaccgatgattgggctctgctctaggcccaaaaaccgcccacttcgtaaaaatctgtctcgagatggcagtttcagagtcaagcaaatgataagaagcgggaacggggaagagagcatacgacttgtgtgctcccatatctcccagcctccaagattggcttcgaggcaatctcgccgtacctgcctggtacgctcctgtccttgatgcgtctgccttgacccggcttgactttagggctataccagagaccaccctgtccttgtgaggcccccttccgccgttcgctttggcgcggttggaaactctggcttgctttacggaatcggcttgtatcgaagatgcaagttgggacgcatttctcctcgctgaaggacctgcacttggggcagatgcgggtggtgtcttgaagtaacggttcttcgtggcatcccaggtcatcccgggtaggtctccgacccatcccgccattgcgtagccagatcgtctaatgggacttccgacttcctccttattttctcagtccacgtaagagatgacggctgaaaagagagttgacattgtcctaccgagctgatgatgacattccgcgttgggattgaagaagattcgctttcgagacaactttgagatcggatctgaccgaacccctgcgcttgcaataataaaatgagcgacggtcagtgacccccggtcaggccatcgcgagcccgtcgaggtagagtacacctttttccttccagctcaagtcgatctttgcatggaataaatcacagattaccggtcccgcagtagtatagtacaaaaaaaaagatagagcgcacagactgattattacatcgcatcccttcgccccccaccattacacaatcgatcagaacaagacaacacaagaggagacgtaattctcgcaaacactacagaaagagtcaaaacgttcagttcagatgatgatgaagatccgagcggaatcgacgcaacgccccgctggacgatgcccgtcgagccgtcctgtcgtcccgcctagaccctccgcgagacctagtacctgcgcgactgactggccgcaaagtaaggtccctcaccctgagtcggtcgacccaggttgctcgggttatcactgtaaagcgtctcttgatggtcgtaccccatctcagcggcatgttggtggggcatgggaggaacaggaggcgcagcggacgcggcagccagtccacctggtccggcacccattccggcgaaattcgtgcccacggtcgaaggaccccgtctgaggtcggcatacccgttcccaccgaccgtctcgtcggcatgggcagagtaatcgtgctgctgtgcggccccaccatgaggagggtacccgtaaggatcgtaatccgccggcccacccgaagcgtaatgagagctcgcgactccgcctccagagacgggtgcggtgaaatcgtgactggggacgccgtgcaagtaattaggctgggtctcgtaggcgtatttttcctgttcggcagcgtcgagctccgagacgaattgacggcgttgacggtcggccgaggagacggacgaattggagaatcggttgcgcgtcttttcgaggaaagggtcgggcatgccggcgttgggcgaaaagtcgagaggttgcatacgttcctatatgaaatttcacagggcacgagtcgatcgatcgtcaggacaagacgctcgctgaaatgttcccttttggatcaccaccgcctctcgactcacgtcgaactttttgcttgggcccaatttccactttcggatgatggtccagatggcgagcgcaccgacaatgacgctagccacgacgatgatggcgatcatggccgtcttgcccaaccccgatttagtcgacgattgtccgttcgaaccggaagccgccgagacgctagccgtacccgctgatgccgtcctcgccgtcgtccggacgagcgaagccgccggggcgaaagtctcctgggtgggagtgacggtggaacggatgatgctcgtcgtcgggacgatggtggacgtgctggtcgaggtcgtcgccaagacttggggagtggtagaggaagtggtcgggacgatagagctcgtgctcaagacgccgctggacgacaagtcgtcatccaagggggtggtcaccgcagccgtggaagtggaagtggctgataaggcaacacgaacgtctcgtccagatcagcacgtcaccctcgaaccgacttgtgatcccaatctagtcgtcgtggacttaccgatagcatccgtgtcgagagccgagctcgtagcgatcacagcggtcgaagaggcctgctccccgcccgccacggcgctcgtggtatcgtccgcgacgacctgactcgtcgacgtgatcgccgccgccgcggccgcagcagcgacagacgaggacgaagccgcagccgccgaggaacttgcctgatgaccgagttcgatggatcgggagttcatctcctcggtctcgttgtaggccgctccggctcgtttctggatatccacccgacggtggatatgcgatcgatggtgcatgttggcggtgacgacgttgacggtggtcaaggccaacaagagggcgagagtgggtttgaggttgaagaagtgcatcgtcgtagagatgtcgatggagttcaactcgaatcaaaggtttctttaaggtggtcaagatggaacgtaggaccggtgggtagggtcgtttgtttaccctgtatcgaacgatctcgagtctggacaagccgagtggttcgcgttgtcgtgataggacgtttactggtgttggtctctccaggagatcaacttggaccgcggtgatgagataggtcgactttgtgtatggtcgtctgataggtggacgactcgaaacgcaggggtcggtcgagggggtcgttgggtttgattgaaaggaatcgccgcgagaggggaagagaggatagagggggtggttccgtgtgggggagaaagtgattgatccttgtcgaaaggatactttgctggtgaatgaatgtgtgtgtataagtgtatatcgatgacttgaggttgttgtgcgttgtaaagtttgtatgaatggatgatgtcgatgagatatgggaggtggagtgtgatgggatgggatggggtgatctagagatggcgacggcgacccgagctgcagcagcaagcaagcgtacgcggggggcgagcgggatacaaacaaaaagggagagcgcgagcgcggcgagggggggagacgacaggggaatcaggcaggcacagcgaacaagggaaggaggtggggacacggcagacaccaccgcggggcacaccctctgaatgactgatgccgtaactcgcgtctgggggggggggggatcgataaacagggcgccgatcacgacgaccgaccgagctacctggaatgaaacatcatcacggcgcctcaccagggatgtggacctcacttgccaccggtcgtctgaccgtcttggtcgctgccacgagcgcgtggattccctcgatctttcttcttttctcaagtttcatccagcctcgaggaagaccaaggaaatccactcgtttcatccgctgcacatcgtatcgggcttcctgcttcccttggtatcaggcgacaagaacgttacagatggtcatcccccttttccttcaagtatcgcgtttggccggcgcatcactttatggaccaagtgattggcatcgaatcttgactaggacatctctctctcgttgaccgattatctactgatcatatctactagctggcctctttttttcttacatttacagaacataccgatcgagcaacctgaatgatctcctcgacgttcatcctcgtattcctcagcgcgaccgtgccgacagtatggagttacgatcgagacggagacgactgggtccacctccaagatttcttcacgtccaccgcagacaacctcaagggtaaaccccgtcaagaggccgatgatgcacgaggcatggggacgtggtgggacgtgaccgaaagcggaggatttggcaaggtcgagaatcacatcggcgagccccaagatggacccagggatcgatgcgggctggcgtttcattacgataacatgctcgggagggcgaggttggacgggtcgggcgagatggatcaggatcttacacggccgttagcggtggccccggtgtgcgatgacgggtttatctcccccgattggataaaggacggagggaacgatttcgcagagtaccctggacgtgaacgtgacaaggaggtcaatggtggcaagacttcagtggtgtttcataattccgccgcggagggtcattctggggattgttactttttcccaacgtgggttatgatcccacatgccgggctacgctctgtctcgagttctgaaaccaactgccccgtactagcgatcctcaaggcgaccgcacgcaagactggtggccagtctcggagttccatcaggagatgcaacaattccccggtaatcccgacgagcaggagaccatctgatcggctttgttgagtggtcaaagggcgcacctttgaaagttccttctcgacctgacgacgacaaatgtatcgcagtccgagctgggagagagaggatcagggtggtaacaacactaccgggcctatcaagacaaagtacatccgagactgggttcagtattacgccaacatcgtctggtccggtaaagtcccgaacccgtatcgttatcgacgtggtgagtgagcaaaccaacagtgggtaggcatcccggtcgacgactgacgcacgcgctttcgaacgcgctaggccatgatatctggcgtaggtactctaccatcgatcagttctggggctggggcgatgatgacaagtacattaccgatcctcccatatgaaggagtgttcttgttcgatatgcaagatcatgaatccgctgtcacaaacatattcatcacggccacagagtgcatccgcttgagatcccgcctgtcaaggacgacgctacgcttcgttcactcgtctagtcagatgaattcgccagggattgctagcactacgtcatgccgcaaatcgagggaccacacgtctcctcgaacctcccagtccacaaaccagcggtctctcacgcatctttcaaatgtcatgcattcgggtattatgatacagctccggaccatcccaagggcttccgcccggttggtccgtttaagcatgaacgtctctctcgcgcgctacaagtatccgtctaaaagaccccatctaaccgttgtgcttgaagaaacaaatatcggcgtcctggacttcgtctacggggcatgacacaaattcggacgagagcgggtcagtgatccgcggtcggagatataatcgcagagaccgcccgactcacaggtccttccctgctgcctcaatttaccggcggccttgacggcggcttcggtaccgtgctctttcaaatcctcgtaagcctgaacttcggcacagataaagttcttttcgatgctgtgacggatgggcgcgcgggacaaacgacgtcgagatcagcaacacgatcatcgccgggatcacacactggccacgatcgaatgctcactcggtgtgaataactccggcagcctggggcgccttggttccctcccggatggtccacgctcggacctcgtcgggtccacaggtaaagaacctgatcaagttgagggaagcgtacccagcggtggtgatcttgcccaacgcgctcgtagctccgacctttttctcctcctccttggcttcttcctcgcccatatcctcgagcctctgttcgaaagcgaccgagaaggggatcaagagatcgcccgggttgttctcatcgatccaagccttgatcttgggcaaccacttgttcttctttcggatgtagtctcgctcggacaggttgacgaggtagatgacgggcttggcggtcaagagctggagaccgttaatgacctcgacctgcgagcggaggagcgaagcggcaagaccggtatcagcacgtgcgtcagattgcggcatggcgacgatgcgatcggatggtcgatgcaaaggggggaaatcggcgacgcgtctcggctcgacgtggatcagagtgtatacagttatctcattcttatatgcggggcgttactcccaagtcaacgagctgggttaaatcgggcattatgtttgcgccctttctcatcaggtgaatgtcggagccgagggcgccgcgggaggatggggaaggacggggttccagagacgggcgcggacgactcacctctttgctggtccagactcccttcctgacgtccttgttctcgtccttcatggtagagagcaccttttcgacggtggccaactcttccttcttggccttttccgccagactgttggccccgctccctcgcatccccctcttgagcgcctcgatcgtcttttccgtccactcgatatccttcaacctgagctcggtctggatgatcctcatatccctggtcgggtcgacatctccctcgacgtgaatgacctcggcgtcgtcaaacgcacggaccatctggaagatcccatcgacggctcggacgtgggacaagaaagcgttgcccaacccagctccggtcgaagctcccgcggtgagaccggcgatatcgatacaggtcaggtaggcggcgatcctcgaggccggtttgtaggtctcgcacaaccaatcgtgtcgggggtcaggcacgaggatacgagcctcctcggggtcgatggtggcataaggaaagttggcagcgttggacagcgaggtctgaaatccgcatgcgacgtagcgttcagtcagtcggcttttcaaggggtgtccttgaatgcgcaagggtccgactgtgggggactcaccttggacaacaagttgaagaaactcgactttccgacgttgggtacaccgacgataccgacctagacgattcgagagtcgaaatggcatgtcagtctcgaagggagatccaggccacaatgtgtatgcgtgggggagtccgaggactgaccttcaagttgttacccggtcgtccgaggaggacctttttctcgacctcgcccttctttgacttgggagctgtaaagtgatcaatgtcgatacgggaggtcagacactgagcgcgacgacgacgacggctggacgtctgagagaaaaggaagtgggtgagaatggggcggggctactcacgcatctttttctttttcgaagctgcgaggtgtagggatgtagtgtgatagcaagccggtctcgatgacgacgtggatgctggagcgtagacggtgaaacgcggtcgtgaaagggtcgtaaacagttgcactggcagtagcgagtggcgtctgatggaagaggaagtgaatgaacctatcgagacgagtgatagggacatgcaagggttggtatattaaaggagaagaggaaagagagagggagggagaagggggggaaggacgtctttcccgggacgctgtcgtcgtcgggggggggggaaccaggtggttgggtcggcgagtccaaggtcgagacttggctggcaacgcaccagagggaaacaaatgtgtcaggctcacaggcagattcaggtcattcccccctctacccacgctccgggtcactcactcgcgagggcgacgcgcgtcggggttatcgccgtggagccaggacaagggggagagcgagtaggccaaacgcgcttgtaagcaggatgtcctctacgcgcttctacttgcctccacctgattcatcctcgcaccttctgcgttctgctttctgcgtttcaggtaagaaaccacctcgggatcgagtacggcacgaacgaggttagcgtcagtccattgtcccacatgaatcgacctcagatgaaccgcgttcgtcgagatggacgacagtgcacatccctcggcaggtcgaccgtccgctcgcctcccgaccccctcgcgcccgcatgaacaccgttttgggaggatgacagcctgaacgattttcgtcacgggttgaaacctcatctggtctcatgcaccgcaacccgagcctgtcatcccgttgtaccattgtgcctggcatgtatggatgtatgacaataagcgttccttccgatcatgaacccttcgtctacccggacgctatgtcgtagcgatatccgaggagacaaaaacagccctctctgacgatctctagtatacaattcggtcatcggaggtgcatccagtatagatacttctcctgatgcctttgttcgaaacgtctagacggtttcttggctcgggggtgatgtcacggctcgtcctgaaacaactctcgaaagaagcatccggcctgaccggagaactacgtctgagactctccatctcgttccaccggaatgttgctgaccacgataaagatcgaccggatagggcacacccagcttgaatatcccggtccttgacgaagcagcgtgatcggtcctcactcataccgtcgacccgatcggtccgggtctggtcggtcgtggatgcaactaacgatgcttccttgtagtcctgtagttagcagggcaagcgtgggttgacctacgtatccccggaacatgctgagacttcccggcgcgatggacccacctcactcgccatctgggctaaatatcgacgagaagatcgtaccgagatccaatgaagcgtcaccaaagatctcgatacgtatcagcgctacgcaggaatacaaggtctttcaaggcgaatcgcgccattagactagcccgtgttttgatcgtcaagggagactacaggtcgtgttcggtggcctccagtgtacgcagttgatagcgctctcaacatcgtgataccgccggacgaccctgcagtttccgttctcgctcgataaagtctgccggaagacgagcccgagcgacacgtgtttctcatcgtagtggacgctgcccggtcgtcccagtaaaatggcgtcaaagtccgccgtgtggagctacatgccgttgtatgcagagaaggtgctccacgtcaggtgtcggaccggaatgacgacctgacgacgttcgagaggattgggtctaaatcggaagaccacgtctacagggatcaaagtcgaaccccttggttcagaaaaggccttgcgccctatctcgtatatcattgcccgatgctctggctcaaaaggcaaaccagaatagctagccttcaaatgctggtcctcccgagagtcaagctgctggtgtcaggcgacggagcaacgagtttcaaccacttgtgcgagacgaggatgcgccagcttttctgttagcgcagggttcgcggaagcatctccaattggaggaccaaatagggtgacgaaaataaggattaatgctcgttctagaaggaacggcatcggcctcgggttcatatcgtgccaccaggaatggtactgcgatcacaagttgatgttctgcgatccgctgacttgactatgacgttgttccgttcttgaaggtgtttcggtgtcgatttaattcaccttcgggcggctgagcaaaagctcacttttcgatcacgctcagcttgaagtacgagcggccgatcgtctgtggagtactaccctccgccccacaatgccatgtccttttcgctggtccccgtgatcacaggtcgcccgtccctccagcgtactctgcagaattgaaagaaccatcgcgacgaaacgcggcagcaagacgccgttcagagaccaggcagtcttcagacctgacaaagtgattaccatagaaggaatcttgcccaccgctggagctgtcacttgaagaatctcctcagtcaaagcggctcgaatgaaagacctgacgaccgtgggcttttatctggccggcatatcatcatgaacgccacaatcgcgcaagagtcggttcaaagccctatcattgaggctgtacgagtgagaggacacgtcttgacaccggggcatacttgataccgtatgctgccgatcgccagtgtcagtcagtaaccagcgtcgccacagcttgttcgtcaatagctcaatcagaccgcttgtttagacagatccaatccgtgctgaccttgacaaaggcagacacgatcctcctcgccgccacgtcctacaggtctgtcgctgggagagtttctgcgtctgcgcgcaaatgcagacccagcagacacatcttcgctgtagatcagtatggtgctgtcatcctacacgaacatatgcgtcgcggttatacctgcagggctcgccatgtcgctagtcacagcggggcaatccccttgtggctgcggcgtagccactggcacgtggtcgacgccaagcgccactccgtactcctgctcctcactacgacctctcgtgcgtgattcattacattgtcatttcaaaagtgtgtaggaagatagcggaaagactaaggggaaatacatgaggtatctcgaatgggggtagaaaaaggttggattgcgatgtaaaacttctatcgagacccagtggcgtaagtgtagagagcagagagaatcgtcgtgcctatgcatctgttcatgagactgccgcggcggcaaacgggcgagttcagtcagaggagcgagttcgacctgtaaggctcccgcatcaactcaccgatcatggcatcaccgccgccttccgttcgctccatcgctcgggtggcaaagtatctatacgataatacgaatggtcagctcgatgaacctcgaacgactcggaacttttgatctcgagacccaccgaacgtcggcatcggaatcctcttgcaatcgctgaagcgccggaatgatctcgttctgaacgacctcttgaccggcggcatcgttttgaagcaccgaagccaagacttcgagcgccttggccacgttgaatcgaatgttggggatctcgtcgttgcataaacgcagagcggtagccaggatctgttgttccgtcacggtctcggtattgagcgagggcgcgatggtctagacgagggacggacgatcagcactcgctcccagggagctgaccggctcgcccactcacggtaatggagaacacggtcgtcatcctgtagagatagttggggtgcttgcccatctcgacgatctggggcaagatggttcccttggcccaatcgacgccaaagacgtcggtcaactttttcaaattgatcgtggccgattctcgaatgctaaacacggtatcgcccaaccaggtcatgcacaaactcccgagcttttcgtcgaaaaattgcacgccgagttgaggagcgagcaagggaatgtactcgatgatggcttgacggacacgccattgcttgtcctcggcgagttgcatgatggcgggcaagagggcggccgagagttcctcgatgccgatgactgcgcggcacggtcgggtgatcagccgagcacgccctcgtcgtaccagatggcgcggatcactcaccatcgttgaccatctcgagcttgccgatcaggtgcaacctgacctctgaaaactcgtccttcaacaactggaggaagaggggcaagaggtgttccttggtggcctgtttgccgagcaagggagccaacccgctgatctgcttggcgagcgcggcccggacgtgttgagatccatccgtcgtcaacgttcggatacaggggaggatccgagcgaggatgacgtcgcgatcgatcaactgggcgaaacctgaggggccatcagagccgggtcgtcagcgagcaggaacccaaggcggctttgagcgacgacctgaactcaccgggcaattgacccgaagcggcggtcctgacctcggcctcgttgtcggtcaacaattcggtataggcctttaccaattcctccctgacgatatcctgcccgacggcatcggcgagctagacggaccgcaaagtcgacggacagtcaacacggccgtcctcgtcctcgtacatgctacgccgtgctgctgctactcacctctacgaaatgatccgccaacatgtacctgaccctccaactcttgtcggtccagctatcctgcaagtgtttcccaaggtccgccttgatctcgtcgtccttgagttgactgcagatggcgatcaggtcggggatggtcaacaacctcacgctatcctgatcgtcggtcgagagacgttggtagagcgggatgacctcggatttgagcaaggtcgattgagcggggaaagccttggcgtatggctgtgcatgcgggacggcggtcagcatttacgacaacacaacatgaactgaacagggtgccgatacgggacggactgggggtgacactcacaccgagcgccttggcagcggctcgcctgaccatgggcgtatcgtcggtcgcgagatccttgaacaaccccctcatctcggtctgtgactcttcatcgaccaaagggtaagcggtggcaaagagcgcacaggccgaagtgcgcgaggtgaaccagtctcccctggcaagtcgacggaggaggggcaggaagtgggattgcaagtgaggggtcgacaggagcggcgtgatcttgttgatcgagtccgaggcctgcacgcggtgtcgtccatcgaatcgagaacaatgtcatcagcaaacgagccctcatccaaccgggtcgatcgaacggacacgtggctgaccttttccctgaccaacgtctcctcgacggctgccaaattctccaacggtcccaagatcaagaacgcccattccttgccccccacgtactctgcgaacccccctagttcctcggcgaggacgaggaggacctcatcttcgtcgtccagttgatcctggaggaacgggatgagctcttcacgcgtcctctctggacccagggcgagggcgatggtgctcagacgtcggatcgaggcgagtcggaggtggacgtcgtcggatttgagttcatccatgaggaggtggatagggtacaaggcctcatcgttggtgttgttcgaggcgttggagttggtggtggggttgttaccggtggtggacgaaccgccgccggcttgtggggtgtattgttggacgccttccatttcagacattgggcgttcgtcgggttcgggcagggtcggctggagatacgtttctctacaacgtacgaccagatcgagagtcagctctatatcaaagcatgttgcaggggtcgaaagacggtgatcatagtcaaaggtggtactcacgctttcccgaggtgttcagactagacgatagaggtcgttgcccgtctacgtgcgcgtctgtcggatgccagatccagagcgagaaggtcggacaagtgtttggtcggggcgatagtgtagtattatgtagagaaatgacgatgatcagttacagtcgcagtggttgtagactaacccattctcaaacaacgagatcacgatgaccccgtggtccgcgcattcgtacgcgaaaacgaggtcgagacgtgatctcgccggtgtcgaatcggagtgtttgagggatcgaaagcaggacttacgaggtttatacttgtgagctgagcgtgagcagcagtgattgctgttgtgatgatagtaataatgataatgaccatgaccctatgttggttcctttgtgtgtgtgatggggggatatgatggagcttggttggtcgacgaagacgagggtggacacgtaaatacgatgattacgtaatcaaacaccagcaggctgccccaggaggcaacctcgatcgatcctacaacctaactactttgatcatgcaatacccaaaacactcactactctacttgcaaccactgactctcaacacactacaactcacaccctcttacaatcaagtagacagcactgtcagcactaccgcacgccatgtctcgacccaccgcacaacaactcgaacagctctacaaacagacactcaccgcatcacaacgtttcgcctcgtacaactttcgcgaatattttgtccgacggaccaacgagaggttcaccccgctcctctcgtcgtcgtcgacatcggcatcggcatcagcatctgccagccaggagaccatcgactcgacctggtggaaagccagggttcacgagctagacgtcttgaaacgcgcgggagaggtgaataggacgttccagggtcccaagatggttatcgaacatgccagacctatcactggtaagtcccccccgcccgaccagcgaagatattctcgtggttgttctatcgatctgggtgtcacgagctgatctgttatccgggctcgttgatatcgatgtgcgatcaaagccggaggcggggaaggcgtcgaagccagcccttgatccatccccccatcctccttcttcatcaccaaaaccccgccaatccagcccgatcgatcatccctagtacagtcctgtcctgtacatcgaaaacgagaattcgcgacgacctgccggatgcgatcgaacgagacaggggtcacatactttacactgtattcttacccaccggacgtatgtccccgatgatcagacgatttcctgataccaatgtcgatgtcgtgcagaggcaggtcgacaaaatacccttcgcgatcgagtccatcctcgtcaagctcacgtcggatgtgtattccacgtgtcggtcagcaacggcaaagcccgtccgaccgaccgggcaagggatacaagatgccctccgagtcgagtcgagtcgggtgaacgagtaagatccagatcggaagatccgtgatctctatcccgggtccgagtttcgatggtaataatggtgggcgtcgtcgaagagagatggggtcatagggtatgctatttccgttgatttctctttcacgggtaccaacgagacggatgtcagctcggggatcatctacaaaaggatgctcggatcgccggaagggtgtccatcgggtcatcgtccgtcgatcgtctgggtcggggaaggggtttccctttttttaggacattttcaaactgaaacgtcagacttgaaagttcgagacttgaaagttcgaggtagtcgaaactccacggccgggaggaggataaggtacgcttgggatatgtcggatatgcggctgagcgacctcgacgatactcatagcccagacggtatcgattgtatcgggaagaagacaatgataataacgacgacgacgatgacgagtccatcgagaagcttgagagtggctctaactgtctatgtcgcctactgcctgccaaagacccgtgtcctcgatgctcaattcagcaaagcactcgacaatcttgaggatcggatgtgtgcagccttggtaccgtttcatcgttacagactcactactctgctcacaagatgaccaatccggcgaaaaaggcaatccgggatgccattgctaatgatccgtctgcctagccagctgctgggtctcattagctcgccgggtttcgtcccttccaaagtaccaggacgacgcaaactgcaagctgcactccaacctcgccatgatcacgcgcagtatttccgcagtgtcaaatcagcttgctctccggaatacttgcatgtcgaccccgatctcgacgagcggagtcaggtcttgtgagtccaagggtcgggaacattccgagcaaaccatacatgttctcgatcaccgtgtaggtggtagcggcgttcggcatgtcgctctgctcggggttcgatcgaaaagggttggcaagcccttagcatcatcgcgtacgtctccgtgtaggggatcaaggacgcgtttcatgcacatggaacgccataacctatctcggtcccgaatcgtccaaccttcgaagtcggtcgtggccatgcgaaggatatctcccaagtagaccacggaatcccttgttgcacatctcatcgaatggacggaggactttgaatgcctcagaaccgcgagattgacacgggtgtcaccctagtttctagcctgtcaagtgaatgctcacacttctgaccacactgtttcacgcgaaatcatgtacggcgggtcgcaggagtacagcgagggctttatattgggcagcccggcgtagtcgcggcttccagttcgcctacttatctgcctgcgtttgctgtgggaaagaccgaagaacgaaatctctcttgatcggggccagaagctgtcagcggaggatcagctctggacttggacggggcaaattttcgtatccagatgaaactgaactcgcaaggtccgagtaatcgacctcccttagagatcaggggtagcccttccaaaccaagcgagctcgcagatgcgcctgaatgccagactctgtctgatgtccctctttacgagcagagttatatcgatgatcgcctcggatcgaaattagtttagatttggcccagctttcttccgatacgtctcggtcgagggtcggttaggagccctcgttctcgcatcagccggcgtattgcctgcctcgcacgtcgtcgtatccctgaagagcttcaagaacccctcgcagaacgtacgagtgggctcgatggtatatccagtcacgtcccacaaggcgagtgacagagaccaggtcgagggcgactgacgtgacatgtttagtcggctgcctcgagtacataactgccatcctgcttcattgatcaagaggttcggtagttcggtagtgttgtaatgacgggcttgagacgtaagatcctccttggtaaatcggaatctttgaactcagaccgatgtcaagatcggggtacatcagagtgttgactgctggtgttgtgttcttccgccatactccaaacttactgatttctgagagcactggatgcaatcaagcaagcacaggtcgcgcgaatcgtccgacagatagcatgtatactttcaagtctggatcaactattgacatctgtctactctccctctaccatcctcttctctcttcattgtttacttgctgaactttttaccctatcctaagcactccataagaacacaaaacacacacataaacatgtcttacgctgctgccaccatctctttggctctcaaagctgcttcaagatctgcctcgttcaggaaggctcgattcactaccggtggaagaccgagcgtgatgatgacgctgaaacgcgccattgagcgacgtgcgctagatcattatgcgcctttttccaacagtctgattatgattatacgcatagaatcatgatgaccctttcgaaaactacataacaattcccttgttctctgtgtatgggtgagaaattgatgagcgatacatgaggctaaacgctacctataggcgatctaatattgacacagtccggctcgctccagagcctcaccacggctaccgttagagagcccggccgatttggccagatgatgggactgatcggtgggcattgacgtggtccgtcggcacaggaggagcgtctctggcagacctgtgacctacgggtcgaccgggggaagtggccgagaaggacgactttctgggcttgggctcgacgtcggcgatggcagatgttccgtgatgcgacgagctcgagacgtggtgaccggtcccggtgctgcctcccacaaagagtcgctcgccgactagttggacccatcctcgtcgtcccacaacaacgctctctctctcgatcgcttcgtactcgattccgctgacgctctcggtccagcgctcggtgtagatggatccctcgctccggtcgattctggttccgaggatgcgttcggcggcctcatcgccgatgacttctcgccattgcccttgagcgtccttgaacaagtgacgggtaggcaagaccttaggctcggggtcgttgatgggttgaatgaaggggctgcatgggcgtcgctgtcagctagagaacgtagatgctgggcctttgcctcgagactcactagatgtggtacttgtggatgtccctaaagatcatcaattcgtacacctcggtctcaagcacagccacgtgttcctacgcgatgggtcatcggcgaaaaatcagtaaacagaacctggatctccgcaatcgatccactcgtcctcacctgaatgacgggctccatgaccctggttctgacgtcgacggtatccaacacaccgaccttgctttcccatccggccctcttgaacacctcgacactcctctcgtccagcccattcttggccttgacccccctcgcgcccgaacgctcagagacgctctcctcgcgagcgatccggctgacgagcccctctcgctggttggtcaattcccggtccctgtcggtggtcgacacgggaatgccggggatgagagggacgtacctgccaggcttggtagctccgaccttgctcatgcgcgagtggttgaacgattggctcaatagggcgaggtggcgttggatgtgctcggcagaaggctcggtcgcgccggggggagatgggtggaaggtgtattcacgcacgggaagataggccgtgttggcgctctggatcgagccggcagtggacaggccttgatcgcgttgtccactggtggtgagcgtgccgacctggttgggctcggcacgagaggctcgggactgggaagcgatgaatcgtctcgactcctcttggaccgccctggcatcagggacagcataaggcgcaagttgtcgaggcgcgaccagttggtgatcctggatcaacggccgcatgttggtttccctccattccgacttgacacccgtctcaacggcgttcttgtcaacgaacccaagcccatgacggtgagagtcgacaggaacataacccatagacccggcatcggtctcgaacttttccctcaacgaaggtcccgtcgatgcccggttcaagagacccgcctggacctcgtccgagaacgccggggtctgcgggacggtaggcagagcaaacgttccgtgagacctaggcaaacccgatcggtcggattcgctcgaggtcgttgaggtttgggtggacgtcttgccgacaatggggaaaccatcggcatcgaacttttggttctgtttgccgagggcattggaatgcgtcgaggagactttcgaaggggtcttttgaacggagacgggagcgacgcgagcttgctggtgacgatcgtcatcggcgtgacctcgagcgttcccgacgacggggatagggggcaaccccttgccttcgcccttggtcgagtgagactgtgagtgcgagttcaagccagacccggtcctgctgctttccaaatccctaggctcgctggtacgttgctgcgaaggcgagggcacgtgatgctgctgaggctggaacccatgctcaaactgctcgttcaggtttctcgcgacctcggtctgtccatcgatatgcccatgatccccaaccaaggtttgccctccgaacccagtgtgctctggttcgaccccgttgtgtgcgggcaaagcgtcacccgcacgaccgccttgggacgagacgcgaggtcgatcgatgctcccgcgggcacggtggtgatccgatgagactcgaccttcccgggtagacgatgtcggcgagggcggattggaacctcgacggatcttgagcttttcaaagacggaagagaggggcattgtgataggggtagagccggagtgtccccagtgaagatggcggcggtgtgttggtagttggccggcttgatcgattaccgattaaacaagatagtgatgctgctgatgaacgacctgttgatgatcagcgaaatctcggacgacacgaagatgaccgaagatgcaataccgacgaggttcaaacagtcgagaactaggaacacaagacgtcggacactgcaagggcgagcgatattgaacgggcgagctagagctagattgaaacgactagtgactcctgactggagcggggggcgagagcaggagggcagggtggtttgtatatactcgagtggtatccacgcggtagatcgaaaaggatcggctagcagtcgacgtacggaaagaagagcacaaaggaacagcgagcggcaaaggctacacaagatcgaagtcgtcgtcgtcgctcgacctggagagtcgaagtggagtaccgtaccgtacgtatttcgacgattcgagcaaagcagacgacgggtaccctcgcgactcgtagtggatttaggtttggagcgcgaggatgacgagtttggccgaacgctggatcgctggagcccacggcagctatcgagtcttcggcgacgaccccaccgaacgcgaccgagacaggcagcggtcagcggctcggtcgacggatctcctcgtttctcccggcgtgactgggaccttcgcagtcggttcgtttgctcgcccggccacagtcacacacacacacacacacacacacacacacacacacacacacaccgacattcactcccacacagagacacgcacgtatgcgcaaatacaccccgactgcgggacctggttgatcacaacaaacaagcagcaaacagactgcggaaacgagttgccgcgcgccagagaggtaggtgaccaacgggtgcgattgcgtacgttgctttgattctggataggtgggaagcggctgcttttcagcgatcagagtgatcatcgtccgtgtttcgaagggatcaagtgacgctcgggtgacaaacaatccattcaaagaatgattttctccagccatcaccttgttcgctctgacggatgattgattgatgacgacagccgatgatcatggtttttgatgacgtatacgacttcggtgacatgcccgcgtcaccggggcgagatgcagcgggaagtgacagggcagaaggcagcggcaatcgctaaacgacggcgtgcgcacggcccttcccaggctgctgccggttgcctcgccctgttcactaatctagcgcaccgtcattgaccgtgattttgattccagtaaagtgtcaccaatcccccccacctctggcgatcgccaatgggacgtgctcatcgggcggcgatcgaggtcaagcaaggcttcgcgtgtgttgacgtcaaaatccacgtaactcgtctcctggcgctacagctttgccgggtgcgtggtagattctggcaacaaacggatcacaggcgcagcggccagcaacgacagacaacgtcgatgatgtcatttctgaatccgtctgcgctcgatgacgattaccaaattaaacggcaccaggcagaaggggccgcgacgagggagaaatggctcgtcataggggtcactcgctggcgacgaacgagtggatcgtcgtcggacagggggaccgcgcaacgcaacgtatatagactgggccgtatcgatcgaacacctgacccagacactctcgagaactcttttctttctctcctcaacaaacacatctctatcgctttctctcgtaaacccctcaaacgaaaacaaacatcaccgaaatggctgcccctacccacaacacctcttccaccggcggagtcgtcgaccacgtcaagaccttgtgagtttcggatctgcgccgggcttctttccctcatgcttcggctgacccccttctcgctcgctcccagcttgtcgggatccaacaaggccgactctaccgaggtctgcaccgagaccgcccccgctgtcgtccaggagcacgtctccaggaacgagaccgtcgagcagatcgaggccattgacagggagaggcacatccaccaccaccagcacagggtccagcccattgttgaccagcagaccgcccctacccagcaccagtacaatgttgtgcccgagattaccagggaatccaagcacgtgagtctagcgaagtgatgaggcttatcgaagtgaacgcgaggctcacgattacttgctcggtcttatctgtattaggacatgctccccgagcacagggagaagcttgagcaacagcgaaccctttaccgcgacaccaaggaggtcggcgatgtcaacaggaccatgatggccgcccctgccgtcgctgctgtatgtaccccgaagacggacgcttcgtcctgcgcatactaaactagtcgtctttcgtaggagcacgtccaccaccacgtccacgagaccatccagcccgtgatcaacagggagactgtccagaacacccacgttcacaccaccatccccatccacgagaagatccacgacgctcccatcgtccatgagcacaccgtcttgcccaccgtttccctgtccgagtgtgagtttgaagcgcgatcgacgtctccatgatagagcgtaccctgagacgtcctggtttcaagcggaaatagtccaggccaaggttggcggagagcaccagcacaaggatggtgaccacaaggtgaacagcagcacgctcgcaatggattcacggttgcagaatgctgaccgctgtatctcttgatacgttagcatgcctactatgaaggctcgccccgagtcggtgccgacggtaaggcacacggtgaccacgaccaccaccacggtgccgtcggcgccgccgctgccggtgtcgctgccaagaaggccctctaaatcctcaagatagagaacaccccttcagctccctttcgctctgattcggtctagtgatcgtttcactatatagttacagctttacgcaacaaacaatgtatcgtttcgccacattctcgtacgcgcttattaatatgttgacgacttccgtccgttctggatgccgaccgttctccatccgctggggctgaacgaaacctggtcaagtggacgttaggcagtgtagggtcaatgatcggcagacagtgtttgaaggagatttggatatgttcaaggcgcgatttgtatccgtgcgcttaacgctcggttgtaaggttaaaggacttttcgatgggtcgatcaatcagtgagatcgtcagtatgattggtggatcaagtgccggatcagcgagcctcccgctcaaaaggtcccttgttcgtttgtccatttttatggtaatcgtttctgatgaaatcacgcaagatgactgggcgaagttctctcgagggagtcaggttcaacgtgattctttcgtcgttggctccgccggcgatattcgtcattcaccgaggtattcgatttcttgtcagcgagacagttcaaagcagctgtagcagcattacttacaacctagggtataagcgttagtcgaacgatacacatgttctggcgtcccgacctccatctcacgccgaggacgtgagcgcgagctgggtgatatcctccatatgactgccaatctttccgcttctgctatgagtaaaaaaagggatacgggaccggagggcagcgcaagatacgctttcagtcccgattgtttgagagcgattcggccacgaaaagcgcgtgattacttgctcgtacatcagagtcaagatactacctacacacaccctgcacctgcaatgcctagcatatcgtaccacagccagccaaaacctcacaacggctcgctacgtctctctctcagttttacaaaagctgaagatcatctcgggcggtgcaatctgagacgatctggtaacatgacactgatgatcagccatgtgaaaggcaacctcgagtagctgacagatttccgctttacggaatcggatggtttccattttgacggcggagataccgagacttggctactgatcttaggctgcagtctgttccccatgtacgattgatggtcgtgtgagctggataaggggttgtccaattcacgaagagtggaggaaacgcggctcgtaccacctcgaggtaccaaagccttcggtcgagattgtttccgcatcgataccacatcccgaacaattaaacttcattccgcccgacattcatcgtcctacacttctgtctttctcagtacggaaagattgatcaagtacgagatgacagtagtactgcacattgccccaactgacatcaggactgatactgcagagacacgaaagcatctgctacgtaaactgatattcaagggaaagatcaactccgcacccgcagtccgcaggtaaaggaacatagatagcttgaaggccccgcttgagattagtgggttagcctgtggagcaacgaattatcaagatgatacatcgttatcgtgatctcctgcttgacccgaagctctgctgccggatcgcggaaatcagccgatcaactcggacattgcttatcgataccagaagtgacgatatccccgcgtttctcgactcgctattcgctgggagacgtgcggggtttacatccggcgggacctagtagcgcgcgcgtttgagattgactccgtgaagcgttctcctatcttcgaccgttcgacctgcacgaatatgcgcggcaacggcgggactacggctggttccttgtccgtgatcaggtccgcggctcacatatcatcttatctgtagcttgttagtggtaccgggatcccatgacgtctccctccagccttgcagcagctatcgatcggaggagttgatataagatgccaatggtgtttgggatatctccgaccattgcagaaaggcccttctgatccttcccttgcactcacaatttcaacgtgttaccgtcaccatgttccgcacgatcgtagacaagatagcgattccgtcaccgcccgaatgcacctcgaaagctgaacaacggctggcgacggaagatctgcttcccgtcgttcctcacaagcgacaatggacagccttttcgtacatcaatttttggatcgcagactcttttaatataaacacatttatgatagcatcatcaggcatggcctctgggctgtcttgggtgagcagcagttgtgctcattgtaccaaccgccgcgctgacaagctgaattttggtcatagtggcaaacactcatcgcaaccgtcctcggctattctcttgcggcacccttcctcgtcgccaacggtcgccaaggtgccatgtttcacatccgattccccgctgtagctcggtcgtcgtttgggatctgggggtcttactggctcgtcttcaaccgtaccgtcatgtcgatgatctggttcggtgtccaggcctggatcggaggacaatgcgtggccgtcttcctcagtgcgatctttccatcataccagaggatacccaacggtattcccaattccggtactaccacccaggcattcttgggatttttcatctactggttgttgtccctaccgacagtttggccccctatcgaaaaggcccgtcatctgttcgccgccaaggccgtcattgctcctatcggtggcttcacttacctcatctgggccttggtgcggagtaaaggtttgggacctctcattcacgaggccccaaaattacaaggaagcgctgcggtcttccccctgatgtccgccatggtgaatttgaaatcgcgaaccttctctcgccttggtcgattctgacgggatgtcctgatcttcgtttctagatgagctgcctgtccaacatggccactttaatcgtcaaccagccagatataggtctctcaccccttcgcgtacctctacaggtcgttcagtgactgacgacacgtcttgcccacctgtgaacagctgccaacgcgcgaaggccttccgacgcgatgctacctcagctcagtcagtccaactcgacccgaaacggttggcgagtgtccctaaccaaagtatgccttgatcacattatttggatactcagtcactcttccgcttggcttcaccatcacttcccttatgggtatcctcatcgcgtcgtccagtcaagtggtttacggcgaagtcatctgggatcctatcgagcatctggcgcgcttcctggacggcagcccaagtcacgcggaaagatttggggtggcaattatcgccatctgcttcgtttacgtgcagttaattctgaacctctcagcaaactcgatcggagcaggatgcgacatgaccgccttgtgtgagtctcgtggtggtctccatggcagtgtcgcgcgcgcgctaatcaatcatgttgcccggttgcaatgaacagtcccccgatggatcaacatcagaaggggatctttcatgtaaggagaagagctcggcacggtattgcgtgatgagtactgatgcaaggtgtacagctgcgtcatctcctgcctcgcttggggaccttggaggcttctgtcctcgtcgaatgccttcacgagttacctgggagctgtacgatcgtcaccatctgcctgttctcccatgagatcattgctgacattgcatcggtgcattcctgcagtactcggtcttcctcagttccttctgcggagtcatgctatgtgactactacctgatcaggaaaggggtatgtcgactcctcccactaagacttctcgacccggcgctcaccgctccgcccgacatctcacagcgctatagaattaccgacctgtacaccaatgctcctcaaggctggtattactatagcaaaggcttcaactggagggcatttaccgcctacctgattgggatcgcccccaacatgcctggcttcatcaatgctgtcgttacggcaggtggagtcccagctcccatctccgaaatcgcgaccaagatttacgccttcagctggttcacaggagtggccgtctcgatggccgtctactggctgctcaacttctactggcctgccgccggaaacaggagaaaggagacgttccgcgagattgacgagtccgagtatgaagaatacggcttgaccaactcgccaaagtggaccttcaaccccaggcacgtggacgagaacaatcagtacgatgccgagttggaggacagcaaaaagctctctggcatggaaaccacagctcaagtagtagatgtgcccgagctccgagcttgatcagctcaagcgaattttgtgttgtatcagaagatccccagttttaggacaccgagagtaaaaccgggactaggtccggggccgttgtagagaaatggtacagtatatagatgcaattggtcccttttttgtcagaatccagcattctccgcgaaatcataaagcacacatctctgacgtacagctgtctggtggtctcgctttacctttagcctgaaacaataataatgtgagaggcacacccgagcgagtttcaatcttgaaagccctccatcaacgttgagaaagcgcgtatcacgtgaccagtcgacatccacccagcctggccacctcgaggttgatgatgaatgtatggttgaatgctccgggattcttggacagagttagacaagtcttcgctcggtgcccctcgaaacaagaattgacaaatagcacgctaccatgagtgagattcagacctacttggcgtcaaagtgaggccgtcatcccgcacagtcaggtagggtatggaagctgatgatgcggttgtccacaggtacatgtccggggcgaaagccgacgccatcctcgcccgaaccgaaggaggacggcctaagaagaagaagagaagaatggaagctacacctgtggccgtaggagacggatctgggctgttgatcgcagacgaggacagcttgactaacgcgtggggaccgaccgagcccgaggaggaggaaacagatgcaccaggtaagtcgacgcacagcatgaacatcgtgctcccgggtgtcaagctgatgtttatgtgagcccagttgtcactgctgccgccaaaacgttccgtctcaagaaatccaattggtcactacctgctgctgggtcctctacccaacccgaatctcccaccgaagaaacgcctgccgagtcctcgacgcccacatcaccaccgccagtgaagaaacgtaaaggaggtctgctgacggccgctcaactaaaagaagaggccgaagctttggccatcgaagaagctcgcaaggaagccgagcgagagagggaacggcttgaactccggcgacaacgacgtgccgaaggtatcgaggaagaggacgacaatccagcggatgatgatgatcacccagaccatcagcggacggtctaccgtgatcgcacaggaaagatcgtcgacgctcaggcggagcgtgcggaacagctcaaggccgaggcaggggatcgggcgaggcaggcagcaaagaaggactggaacaaggggttggtccagcgaaatcagcgggaagctgaagcccaacgggagaggcaaggagccggatcgtcgtttgcaaggtcagtctggtggcacgaatgcttggcttgaagaagggttgagctgaattcataacggctgccgtgatagatctgcaaacgaccgggatatgaacgacgagatgcggaacgaaattcgaagggaagatccagcagctgcgttcttgacagtatataccttatggtcctgattctcggttgtgcaatgtgccgctgactttgcctatcgtctgtcaatgcagaaacggaaaaagaagggccctcagcgaccgaaatatactggtccggcaccccctccgaatcggttcggtatacctcccggtttccggtgggacggagtcggtgagccgagatctcttcgctgggtcctcccattgcgccgaatactcatcgcgaccttcgtgtttgcagaccggtcgaccgggtacgaatccaagttgttccagaagatcaacgagcggagtcgaagggcgaaggaggcctaccaatggagtactgaggagatgtagagcatgcgaaacatgtcacggcagccgcgaatgtattcgctcgacctttaatcgatacatcataccaagaagctgtctactgcaggaacaacttcagtcgggaggagaaattcaaagagaaccggaagggaagggactatatgtctagctcagatgacgcctcttggtgagaccgtcgtcatctacatctttagaattatccccatcgtcctcttcatgcaacgagtcctcgtcgatctttcagtactcgcccgaagcatcatcgatgatgacggcagcgatcaaggccgacgagctggaagcgatgacaacctccgcggcatccaaaaacgcgacaggttgttaaggctattcgacgacttcattttatgtaaaaacgatgcaaaacagaaggaatagagcaacacgttcagctaagtcgacaccttctgttgtcccggttattcgtctttgtcttccaagccatcccctttgttctcttctcactctttcacttatccttgtctgaccggcattcgttgccaagtgcatcatctgtactcatgcccttttacgacgagccattttaaactgtcctataggagacttcttgggactcggcatgatatgtcgcgcaccagggcaaatgaccaaacgccgcaaacaaggcgaggtgtggtgatttgatagagcaatgcacggatcgctcctttcgtcatatcagttcgagtcgatttcaagaatcgcgattagtcggcaaagtgtttggggcttttgatgggatcataagagaaagatgaaaggcgacggtcgcttgctcgctctaatttcccattcatcctatacgaagaaaaaatagctaatgacacaagacacgaaacaactgttctaacctccgcgtctgtacatcatctaatcgacatccatgtcctcctcgacctccttgccctcctccatgtcgacgtcctccttcttggtctcctcctgagcgggcgctggggtctcggtcttggcgaccttgggcttgggcctgttcatgattccggccgaggtgaactgcacgtcgtcccgacgggacaagatctcggtcgactggatgacggggtcgacgttcttggttcgctcggattgacggacgaggttgtcctcgagccacttttggttggtggcgcacttttcgatctgcgtgtcgtgaaggcgtcaaagcgttggtcagctgggctcgtcgacgacaatcacacatcacgaaatggcgctcgcgatactcacgaccttctccttgtcagcgtcggtgatgtgagagtacttttcgtcaccgctctggacgatgctcatccagttgttgatgacctccctgagggcggcggcggccttgggcctctcctcgctctccttccacctgttgtagacggggtcaccagtcttcttcaaggcggacaacctctcgacgtaggccgacttggtggcatcctctccctcgtcggtgtacaaccagtcctcggcggcctggagaccggacaagagctcctccttctccttagcctggacgtacggagcgtatcgtccgtcgagcttgcctcgggtatcgtagacgtactcttcgagggcgttcttgcgctcctcggtctccatgacgagcttgtcggacgaggccatcttgccctcctcctccatgagcttgttcttggtctcggaggtgaatccaccgtatcctccgacgaggctcaaagtgccggtcctcttgaccttgcggaccttgcgggtctcctccttcttctcgtcaccttcaccagtggtgaacttttcctcctcctcgacctcttcgacggtgtaggcctcctcgaagctgaggattccgtgcaaattgagacgggccttgaccttgacgcaggcgaggtcaccggaagcggtcttttggactcccttgacggagaccttgccgatccaagggttgacaccggcgggaatacccgagtcctcgctgtacttggcctcgagctcgaaaggtccagcccggtggaaggtcaggaccttggtggacgggatggcgttctttcgggggaagaccatgagctcggtgtcctcgtccgggttgccctcctccttctcccaagtgatcttgatggcgtaagggttgatgtcgttgacggcaaactctcggacacggaagatgggggacaaggtggcacaggcaaacgtggcacctcggcagatggcctcttcggcgttgagcgtggtcgacaagaccttgccggcgccgaagaatttaaggagacgctccttgatggcggggatacgggtggatccaccgaccaactcgatggcgtcgatctggtccaaggtgagaccggcctcggcaatggccttttcgaggggcacggtgacacggtccaagaggtgcgaggtcaacttctcgaaagtctcccgggtcaaggacgacgaagcgtcaacgtcgttcatgatgctctcgacgttgaggattccctccgagttggcggacaagatcttcttgagcctctcgcacgaggtggaaagacggaagatggccttggggttggacatgacgtcgatcttgtacttggtcttgaactcttcggcaaagtgctggatcaacgcatagtcgaaatcacgtccaccaaagtgggggtcgtaggcggttcccttaacggtgagctgacccttgctgaacccgacgaccgaggccgagtagttcgagtgaccgacgtcgacaaagacgacgtttcgggcattctcgacgccctcggggaggtcgggcttggtgataccgtatccgagagcgacggcggtggtgtcgttgatcaatcggagacagttgagaccggcaatggtggcagcgtcaaggacggcacgacgctgaatgtcggtgtaccaaccgggcacggcgatgacgatgtcggtgacgggagccttgagctcggcagcggcagtgtccctcagcttgccgaggtaagaagcgacgagctgagtcgagttgaaagtcgaggtctcgccgaggtacttgaccttgacaccgacggtaccgtcgacatcgacgagctcggcgttgataaacttcttttcgtactcgctgatctcggggtcggcgagcgttcgtccgacgagtcgcttgagggatccgatggtgttcttgaagttggaggtctcagccgtcttggcagactctccgatcattcgttgcctcggggtgaatgagacgagcgagctgcgaggcgacagtgacaagtgagtgagcggggtggatgtcgacgtgatgccaagctgctgcaactcacggagtggccaagttggagacctcgttggcgatgacactagaagttggagaaggtcgtcagctcgagcgtttcttgccatgcagaagaatgagcactcactcgataccacggttacgggcgacaccgatcttcgaggccaggtttccgagatcaattccgacgacagactgaagtgagagtcgtgtggaggttagctgagcgtgacgagaacgcggatggaccgggacttgccatgatgcaaagtttgttctattaaggtgataagatatggactgggggtcgtgatgacggcttcgtggattattttttcctcgaaactgttttttcgtgtataagagaggttgatttcctcgtctatttggatgtgtgtgggttggaaagtttttcaagtatacggaacgaatctatacacaggagtgatttgtcgaaggtttattgcgggtggtatgaaagggggttggtgatatcgacgtcgtcgtcgatgaatatggtgatggtggtggtggtgattccttccctggagatggggtggtggctgctggctgggcaaagtgttctccgactttttgcgcgtatttgccagaaggacgagggtgaaaatggatgacgtaagccaaaatgtagccgacattcacgtaaatattacgtcgaggatataacttgatagcagctggatagcatgacgtgtcatttcactcgtcggcttcgtttcacattgacaacggagggctaaacgggtcaaggagtcacggtcgcatggttgcacaatcgactgctatcctcgcagagtcaacttcagccttggggtcagcaggtccggtctggattgacatcattgctcgagggaaatgttgtccagggaaatgtgtgaaccgtcgaagatagctgtgtctccccatcctatatcctaatcatcccactgcttcgttgcacatcaaaacaagtctagtagaacaagcacaagagtatcagctctaggatctcgcaaaccctttccttttccatactttcaagagcagaatgacgagacaaccagcagacgaaccacaaccggacaaaccggacacgtctcactttcgtgctcaacaaaaaaagacgaaacgtctccccagctacctcttgaaacatccgcacgtccgattgacagtgaaaacagtcagagtcgccctgccgatctcggcggcgatattatggatgacggcatggtgggctagtccagaatatttcgattatggcgttttgaagagcaggacagggggtggtagtgtccgattcggagggatggggtggtgcgggggagagtgagtccggcgcatcaattcccggggaacaagcactgaagactattccgctgtctattgatatcgctgaaccgagtaggaacaattgtactctggccccttggtatggtcttcccaaggagtacctaccggcaagtcttccaaccttcttgccggcgctgttaacactcttcaacctcctgggtaagctcgaacacccagcttgtgtcccacaaccaaaactcaaccacaacgtgtactcatacgatccttcctgtgataggcgcgccgatccttcttttctggtggatcggcaggtacatctcccgtccgtaccgctactggacggcctttcgtgcccgccgtcgccaccgctctcgaaataccgaccacctctcaaactctgtccgcccgttcgagccttattggtggttccgtctctcgacgccttttctccattataccgtccttgggtatagcattattagcgccgtactgacggtttcgttctttatcggcctcactggggagacggggtggggggtcacgatggtctgggcgagcatctcctctgtttggaaggcgtccggtcgaattcgatgggggttgctgatttgatcgaatgattcccattccaccccatcctaccccatcccgtcccgtcccatctattcggtccgactttcctgtcctcgctcgacctgttctgtgtactatcgaccggcgtgctcctcttcatcttgcttgcggaacccgactcccgacgctcgacgaccgactctactcgtacccatcttagccggaacaacctcgaattcaaactcagggatcaatacctcgcccggtctccgaaacagaacccgttcgggaccgatcgtgaacctcgaagatggatcgaactcgggctcggtcaaaaggtgagtccgggatcgtcatcgtcgtcgttgttgtcattatcgttggaagcacgctgacgaggattgtcgttctgctgcgggggggactcgaaggtggacgctttgtacagggtgtgcgaatggcagtggtccaatccgcaaaagttccgggcgttgttgaatgacgacgagccgactgcatgggtgagtcgatgtcatcggttcgaggtgtttggcgagggggaagagactgatgatcatgatgtcggtctgcctgttcgtagcgtgtcgaaccgatcgggtgggacaaggatgaaaactgttactggttattcgacggtgagcatcggctgatagcctgctacgacgatcgtatggagactgatgaacctgatccagataatcgactctgggtacagcatcccgcccctaaaccgccgaaacctcccccaaaaccaaagacgaattcgaaaaaggccaaacaggccgctcgggccaagaacaagtcggccgcgagttcttcgactcgcaagccccaggaaaaacgggcgaaggcgtcggtggaagatccggtagaggaagacgaacctggttcatccgctactcgtcgctcgggacgacgccaacctcctggaagggccgctagtccgagcttggacgtcattcagaaactgatcgccgaggaaaagggactgcggtcgacccggaaacggacaagagatgaagcctcgtcagagagaatgaaggacgacatggagagcactccttccaaacgattgcgagaccgttcaggacgggcagccccgacgacgttgatgacccccacaaaaacagctttgacggctgcttcgagcccgatgtcggggtcgaggtcgacaagacgaacaagagcgacggccacagaggaggagatatggcaacccattcccgaagaatggttgacacccagcaagacccgaacgtcggcgagggacgcaaagacgcccagccacgcggtcaatggaaagggcaagggcaaggagacggccagactcaagaccgggttggaaagcgattcggacgagtctgagctgagcgagctcagcgatgcggaagcggataatgcatcttcaatatcagtcaagaaggcggcgcatgcacccagttcagagttgtcgttggacccggatcaagcagactcgggcgagaccaagggcttgtcgcgtgaatccacacccctctcggagccagaagtcgtgcaatcagacgagacacaagagcggaatgatgaggagactaccagagcgggatctacattgggacaggacacgacgatggtggatagcgagactacaaaaggatcgccgagtcccgtgcaggacccggcagaggtccctgaggaacaggcagagactgaacatcttgagatcacggattcaaccgagaatccagcggtagtccctgaaaagatggacgttgatgagaatccggacgatgggtttaatggcgatgcctcgaacaccaatcgaggatctaccacagagcttgtggctgatgctgtggaggggtcagcccctcgggcggtcgaggaaaagtccgttgctatggacgacgccggtgacgtggcagaagcagtgactgagaaccttggtgaaaaaggcgcgcaggatgcagaacctcccgttgcgaagctagagcaaccggagagggaagcgatgtcaggcgagctcatggacgtcgagctcaaagcggaagccgagccaccaaaagaagaggtggtcgaggaggaggaggagattaccgatgaggttctgctcgcggccaggaaagctctcgaccccggctttcttgaatgggaatgtgtaagcgattgaaagcttaacaacggcactcgagcgggctgaaccaactctcagagtttctaggtctgtgtcacgcggtgggattgggaaaactggccagagcaatttgcgggtagccgacatcccgatgagaaggcgttttacgatcacatcgtcgagaacacccggcctgccgtattagttcacctcagggtaagtacgcttcattcacaacaggtacggcgacatcactaatctgaaattctctcgatcgcgcaggaaaaggagatacagagagccaaggaggaggccgttcggaatcgtaaacgctcctcccgaatcgcaatgcgcgaactcgaaaaggaagaagctgccaagatggaagaggtgcgccgggaccttgaagccaggatgcaaaaggtccgagacgaggaagcgagagaagcagccgttgaagccgagaggatggcaaaggagcgcgagcgggaagaccggctcaaagaccgagaggagaggttgaaacaacgggaggaagcagtcgctcagcgggcaatcgaggagatccgagccaaagaggaagcagagcgcgctagggaaatcagggcgcaaaagcggcttgccggagaaagcgccgccggatcgcgatcgggaactccgaacggcaccccgaataagggaaagggaaagggcacggacgctgaggcgcctgtgtcagaaaacgaagaggacggagcggctgaagaagaggaagaaccatgggaactagcctgcgaggtttgcaatcagcatggctggaatgttgtaagtggtctcgcgttgctcgtaacgtgccttgctgtctagaaaactcactctggctgctccaggatgacggtcggaacatttgctgctgtgaaagctgcggccgatggcagcatactgactgtcatgacaagcttgacgattcgaaggggcgcaaacgacgcaactggaccagggtcaacttttattgccatgattgccgtaagcgtaaagccagagagcggcactcggcaaggaaaagcgcccaattagctctagctgctgaagctgagcagatcagtcctaaaatccgtttgagtctacctcgcgaacaagagtcctcgccctccgctacgcgatcgatttctcgccctgtcccgcaaggaaacagccaaggcctgtcgcagggacaagctggctcatctcgtgttcaccccgctccccaggatcagatggtacgcccggcatcgacttcgatttcctcgattcgcctgccggtgtcatcagtgccgcagtcgtccggagagcagcggtaccctcaggctactaatggttatggcggctatgctacacctcaacgcgctgcttactcgcctcaagcccgtccacaagcacaacaagaactgcatcctaccggctcccatgcaggacagtctaggtaccagcagcctcccatgcagatgcaacaaggccccgtgatctaccgccctggatatgctccggtacagactagtgtttatggagcttcgcctcaaggggcactgattcagtcgccgcctatcgctggagctcaacaactctatctacaatcgggtcagccggtatatcgccatcagatccaaccgacgcaggtgcagatccctcaggcggggtatcggccctcacctggtcaaaagggcaatgtattgacacctagtcatcaacaattagcgcactcgccagggccaccaggaccgagacacgtacaggcttcaccaacgcctcaggcagtgtatgctgttccatcgccccgatctctgccgtatgcaccgcatggccaagcgtatcagcctgcaccacctccagcgacttccgacgttcgttttagtcaaggtgcaaacggtcctttgccctatcagcaaacagctcgacccacttctaatggtcaatcggttcaggtcagaccgatgtacggtgggtacgtgcagcaccagggcgattcgaaagcctatacgcagcaacagcctcgacctgccctggacgctcgagtccagcctccatcatcgcacgggccgccgtctgtgccccctccctcaagatgatctgaacatttagctttcgactttgctgctcatttattttgacgtctctattgtatccgtccacgatgagactgtcgatcgacgactcgcgacaagccgctgatacctcccatttcaagcatcgtcttggacgcctacaaagtgtgtagtcacgccaatgatatcaaatacatttcgcctgagacatgccatcccgcgggacctcaggtccgcagtacctacagcgtcacaagctgcacctctggagaaactcgaatggtcatgagctcaggatgcctgcagcgtccttggctcatccttgtcgtttggtaccttaaattcggtgtgatgtcaagggaggttgggagcctcatgcggattggacgtagatctttctgttgcgacttagatccagctgaacagcaaggctaaaacctcggacgcggatttagaaagtgtcaccatggaggctgcgctttatatgagccacaaatcaacaagttttataaattgctatacaacctcttagattacacttcccacgtattacgacaaacccgatgcgagctaccctcggtacgtctcaactttgaatggcgatgcgcaagcccctctccaaatcggccaacaagtcctcccggtcttcgattcctacgctcagtcgcacgaggttctccgtgatccccgctttcaggcgatcttcgaccgggatgctcccgtgcgtcatcttccacggagcttctgcgagagactcgacacccccgagtgattcggctagggcaaagagccgaagagactggaggaatttttcagtctgagcttcgtcggcgcgaagacggatggtcaccattccgctgaagggaattcctccttcgaccagctccttatcttgccccgcatggccgttcgatccgttttgactttccttcccgctggcaccttgatcgagtttccaacccagccgttgcaagtcccttcgagcctggtcactcaagctccatttggcacgttcgtaaaacttgtcgctcgccagtccaggatatttgacttccgtgacgagcgggttagattctagacgtgaagcgatgtagagggcgttgatcccatgctggagtgctcgcaggggaagagtcttgatacctcgctgagcgaggaagcaatcgaatggggatggaataccgcccctggaatcgcagtagcaagacccgtgtcagactattccgtgatgatgcgcgacgtgctttgactcacgagctgttctgcagaaacttgagacccctcaggagtctcccttccaagcccttcttgatgatcaaggctcccatgatcacatcgctatgtccattcaggtatttgctgatagactggagaacgatatctgcgcccagatccaaggggttactccagtatggcgagaggaaagtgttgtccaccacgatcaatggacgatcttgttccggcatcgagcggacgatcgaggagatgagctcgagaggcgggacgaccaagagggggttggtaggtgattcgagccagatcaatttggttcggggggtcagtgccgaggaaagatcttgtggcgagatctgggccatatcaaggaaatcgacctcgactgatgttgtcgcctcggctacccgcttcaggtaccggtaagtccctccgtactggagcagggcggatcgaattagctcctctattgatcgatgctcggatcgaatcccgactacttaccacatcgctgatcgacaagattcgaacctcgtcccgctttgagcctttccttccaccaccttcagcgatgggcagtgtcaaccactgacagatcgctgccgtggctgcactcccactcgaataggcaatggcggctgacccatgttccagtgaagcgagcaaagtctctaacgcttcacgattgggattgatagatcgggaatagtcgtacttttgagaccaaacctccatgatgatctagcggcaagaaacgttcaggccgaaccgattcgcagctcaccttggcagtccccacaccagcttgcgcgaatgtcgtgctgagcgatagaggcggtatgacggcgccagtgctagggtccggttgagatcctacatgaatcgcccgggtggcgaacccatcctcttcagcatcgtgatcgacatgttgtttcgtcatggttggtagcagaagtgtgatggtgtgatctgtgaagagccttgtatgtatcgaccggtacagattgaattgagacggtcaattcacgataccttataagcttgtaccgcaccgagactacagtatttatcatgcgacagtggccgatcgaatgattaccaatactacagtgacagtccaccctttgatctctaagaagatgtgtgaactgactatttggtcttctcttcctgcttgcccgctcggtcatgacggttcgaccgagatgatgtcgccatcgtttatcggtcaagaccgaaatgagatcggatccaaattattcaatttgattccgaaacaaccaaacgaccaagaaggactaaaccgttgcaaagtctcatagtctttccccgctgtagattcccctcgtcctaccccctccagacgaaagaagctggtctatacgcccagatccccggagtacgatccccccctcctctggattcgttccgttagtccggtggcaacggtaataagtaccatttaacgtgtcaggaatgcattttctgcatgactcaagatctgccgcacaacatcgccactctgtgttatattggggatacgatgctgtgctcatcgatacggcgtttagacggtcagaaggctaggaaataatctagattggtaacgaacgcacgtaggtaggactcgctcggggacgttctggtgtctgcgcatgatcgcaagataggaagcgaggataaagcgtgtaccgtcgagcatatcgagtgacaccctgctgctcttggtcgtctgatcgatcctattcgcgggtttgttaccatcgtgacgatacagcatccaatcgttggaagtcatgtctttgacacatcactgcgctgttgttcacgaccatgcctggaaagcgcacacgctccgcagtctccctgttgagcgtcgatcacacagcctcgatcgacaacgatatgaattggtgagcacctttttatggatgttacctctcgctcatcccagccgattcagaaagagtgttaagtcccatcgccgcctacgactcgatcatctccctgaacctagtgtcgtagtcatgatgatacccagcgcacgacgaccacaacacgactggtcggattcccgacatgtatgtggtagtggggattgccccgtaacgttcatccaatcgagaaaaggatcgcggttgtctgaatcgatcgccatcggtggaatgtcgacccgaaggtagtagtggaagcgccaacctgatgcactactgttgggtcttttggtctcgcgaatgtgaactacggaagatggatctgattacgtgcaagaggcatgaggcaagaggtaaacttagctcgtcgattcgtgcgcgatttgcgatccgagatctgggatgaaacgagaaaggggtcaagtcgcaggtcgataagacaagacccacctggaggtgagagctgacgtgaggaaattcgaggaaatcccccgccgcttccctttgccccgttgctggatctgaaaaacgcctctccctttcctccccgccctgctggcttgtgcgcctttctaacgccaccggggaggatgacgcaacgcaacctcgcgcgcgcgctggaaattcacgcgcgcgtgattgatccgtcgtccaaccgggccgtgtcggttcgcgatgatatgatgatgcgatgatgcgggctcgcgaggttttcatgttctcgctcgcgtttgttgatcgtctgcggacgatggagatagacgagccgaaggaacgaacgacgtcgcagtagtagcagtcttgctcttggaatcggttaggttgaccctctcgactggcgcgactggtgtgtgcctgcctgttcgcccttggcccgtttgtagggtaaatttgtgattcggtttgtcgtggtggttgtcgtccgaaaatctctttcgtcatcgcgcgcgtgccgatgcttcgcagctgccgggcggggttgatttcttatgatcagtttctgataataacctccattcccaaccatccataccatcgtctccacatcgtcgatgtcgtcgtcgtcccttgttgggaacactaagcagacaaccgataatagtcaaaggttgaaaagtttagtcttcgcctctctagactgaatagacaaatacaactctgcctcttgacgtcctttccatcttcacgggaaacacccatctcaacgccgaaacatcacatcacggtcatttacttggcgaatccatctgggtacggagctctaatttacgcttcaacacgttatcaagaccgcagtacagttccacgcaagcaccggagcattcgtggcacagcacgaatcgtcctctatcagaaaccatttatataagagggactcgcccatcaacagagctcggcgttatacctgccatcagctacatctaccaggacgacacccgcaacgccccgtcataacacttccacgtccacaaggacatacacgtcgacacctagtttcgtatacccccctcgactccgtggtgtgcccttctcggatcctcatatcaaaggaagtactcggaccgaacccctcgtcgagccagagtcgagaccctttgtctacttcgcgcaaccccttctcgagcgacacgactagcgaaacgccactgttctcgtcgagacacttgcgtataaagggctttattcaagagcagcggtaagtcggtcgtcgagtgaggatgatgtgatacttgacagcgtcgattctgatcactttgtccgtgctgccttgcagatccaggtcgagcgccttgattcccggtgtagaacaacctcaccgagacccactatcgatttgcacgcgtaatcatttgtgacaatcacatcagtaacaaacatgtcgacggccacttcccctattcctaccccggtagatacttcggcaccttcctccccacctcagaccgactacgcggcagctctgcagaggtatcactctcagctacgggaccgcatcttggatgggatctgggccgatcactcgccagctcccctggcttcaggatcaaactcccgcatgggttcttcttccacatcgaacccggcctcggctttgccttcccccgctagacccagttcgtacgtccattcgacgccaatcaagggaaccggcgggacaaggagaggtaccccgctcagcccgtccgccctggctttactggccaaccagcctacgcgtggcacatccaaacccagcgccctcggatcatgggaccggatgatggcggacaagcacgccaagactggctcgaacggtcatcctccccagggacaagcgctggaagagccggatgaagagttgggtctgaggacgagcaagaggatcatcaatcctctcacccaacgaccgtacacccgctcagaggcttcttccggcaagacccggtcgatcccaggtttgggtgcaaatgaaatgggaagtggctccgcgaccgccactgcaagcgggagcgggagtgggacctacatccccgtcaaatcgctggccagcgttggaggaagtctaggttccaggggcagacgggatcacgagtctggcgaagatcgatcacccgcagagcgggacgagaggaggtcgagcagtcgatcgaccgaggtcaggcggatcccgggcttgtccagagaaaggcctagatcgggcgagatgcaaaagagggaggtctcggcttggtcaagcagcgaatccgattccagtttccagagtacgcccaggagttggacggaccgcgaagaacgcgctggaaggtcgagaagagcctcggctcgcccttacgagcatgagaacgcgcacgacgttgatgacgacgagagaagcaactctgggaacggaaaccctgtggtcatgatcacaagcaacacctcgccctctcccgctcctggatcggtccgaggaaaagtcgacaaggacatcagccaaatcatcgattacagccttccattgcgatcgcctacggtctttcccgtttcttacaggaaggacgaggttacgggagaaaagacggagcgaaagcttcccaggggtgccaaggttcaggcactgggcttaggattgaccgccatgactccaacgcccggctcttctcctcgctcgtcgacctccacgggcaaaacgggatctcgacccgcctccgctgttctgacccggaccagctcgacaagcacgccttctaccggaccctcgttcgtcgacggcatcaagaacgcatccgctagcgaaatcggctccgccttcccgacaccggccgagtcggaggatagcttcgctgcgatcgcgccaagcccattgtggacaccctcggtcaacccgttgatcaggggaagaaactctgcgaccgagggagcgccgttggtggcgggcgaacagccattctggagtatcggtaacgatcccttggtcagtcgcaaggggatgttcaggcggacgttgagcggattgagcacttcccggtgggatgtcgagaatgactgtgaggcgcctgttgagaacgatgaggatgacgggctcgtctcggatggtcgagacgttggattcatggacgaccttctcgaggattatcagctcgcccacccgcctaccccggcggcggcgttatcgaggtcgaactcttatctgggcaaggcgttcgggatgaccgcgatgaggcctgtgattggacggggcggatcttacgcgagtgacaaggagaatcgaagcctacaaagcaggccgttggctaccaagaccagcgtgcagcacgtagaaactcgtgtgctcgctgccactatgggcacagggtcagacgcacctattccttcccctaaggccaggcgtaacaacagcgatggcgcgcccgcatcaacagcgccgagcccggaaagtcaaaggagaatgtttaggatggtccgcaagttgactttccagcgaccgcatcacaaagacggtcggggcaaaggtcgaggaggagattggacgagagaatgcggcgaggccatttgaggcgatcgctcgcaactattcatatactgtattactagttacactgtatcatcctagctaccgcatatacacgacgacggaagaaccatgatgatgatatattatcaagactcggcaggcactgctctgcttgcagacgcgcggtcatagctccgtatcggtctgtgcacgtcgacgaggtctgaccaacactgccgggagctggctctttccaaaacgagcagaaggcgcgatagaaggttgttgccatttaaagccaatccgcatacaatgctcgaccagcgcttacaactgcggcaaaactaattcaggacagctaccttgccttttccatgcatctgactttgtttgaccatagtcaggtagaccaaattctagggacgccaagctgccgcaaagtgtgtttagtgcgaatacctgctgatcacattgttccaacaccaggcaccgagcgcaccacaatagctctgttgaagatttctagattgacgagcctaggcgaacaaacaagccaaaggtagatccgcgtcattgggttcctttcgaggtgagtggatcttatgagccgcgtctagcgcgctaaaccttgtctgaaagtggatcaagcatatccgacgatccttcccaaaggggggtcgcagcggttagtcttgtgagacaagtactttatgctcgcatcgtgcgccttacatcttcacatctccggaacggcctgtttgttgaaccagaacggccttcatgttagctgagccaaatttactacagtagatgagcgttaaagatcaatttcgcagcaccatgacccctgtcagtcagaacgcagcgtatggtgtcttcgcccctcgcgactaagccgttatttctcacaaatttatcgctccgccggagagaaggactctgagaaaagccgcaatctactaatcctcatcaagcttgaaaattgcaatgtatgaggatgtgtgtccttcttacgggaacttctgctcataccccgttcacagcttctcagagacgccaccagagctcgcaagtggctggaaacagtcatcatcgaggtgtattatatcctgggacagaacgacatatggacctgtcggaggaacatcgtcatcgatatcgatcgacatgatcgggaaatacctcccgccgtggttcaggagctgaagctattccctcagaccaatatcataactgaagacagcgattcgctcgtttccgcgatgacatgtacgtgcactgcctagccctgaagatgcgttttattgacaccgagccgggattttggaaacagcctgtctcgaatcgcccttctttgccaatgccagtacgacatgtttcctggtctcagaccacgacaacccgtcgtatatggacaccacagtaaagttttcgaggctttcccatacattggagagacttttcgtcttgcaagcgcctgatactctcctgagcgaggcaagccgttggcgacaaactctggctgtggaagaggttgacctctccgcaactcggcctcttgagaccgcgaaacatacaggctatgcagaggacgaagttatgtctattcccgaaggctctcatctttccgaagacactcttgtcccggatttggccgtcgtctcgcagacgagtccccgcgtgccgagcggtgaaagcggctcgaccgcttcctcttcgaggttacctggtggcttcgcggatctccaaactgacacagcgacacaaatcggggagattccacagaagacgagtcccgaaagcttcgtgaccgctcaagagctcgaagatcgcggcgagccggacgtcgttcacgtcagaacgtaccgtgtaggcgatgtccattgccatacaatcaacaccagagggaaaacgagactctgtgagcatgtccacctcgtcatactatctgcttttttgaattatttaccgttcacccgtagatatcgaaaagttcaccagtatactacccatcagacacgctttcggaaggaacccctgcttggtttatcacatcaaggggggctgcacacaaccggactgctattatttgcaccaagagattgtcttctcgccacaagcccttgccgactacaaggcccatctcgcagatctcccgtgtgtccagggagagtactgcaagtatcatatgcaggatctttgctttcataagcacgatcaagatgcggaacgtaaaattggcgaagctgacgacaatgaaaccggccatgcagccgatcaatcgttcaagcctaaccttaaggcgaaaattttcgctcctgctcaagtctatcaacctcgtgcgttctgcttgcttcaactagatacttagttatgctgatttgacttatcagccaatctcgtcaatgatttggcgcgtgcgtgggctgaagagccgacattccgcagccccgaactccctcatagcgatcccaagaggtacctttcaaacatcggaaaggagtgagctttgaatgctgacacgggactttcaccttggaacagacaggtcgatttcgtcccactcgtcaagcctttgcatcatctgggagaactccgcttcggacaccgagtattgagatctactctgggtagcgcactcaagttatctccagcttgtccgatcggcagctcagcctacccagacttttgtcgttatgtcgaagcggctgagcgatacggctttgttaaattgggctataacagagcgagggatgcatgggttcggtcgacgggaaagctggagagagcctgcgccggtaggtcgagatcatttgccggtaattcagacgcgcgctaacccactgtatgagcacgtctaaagaaacctgatagatatggcaggtgaaagcactacctgatcttgatgattctcggcttttgatatttctagtcgcgatttaccgagatccgttgtctgttcctactgtatgacgtaaactgccctacatatttgaatagagacctcgctggacaatgtaccgatgtcgtcggaatcccctgcaactcgttctgtcggaggagagccaagtttgatcccgcgaaacgatatcgcggcttggttttcttttgtttcagctgtcgcttcggtcaatgcaatggcgatccgacgaccaataaatgttattttgtgaaggacgaccgtctaagcggtcgtccggtggatcgagaagcaattctagcggtcgccgccctcttgtcattgcaagaattcgcacatataaagagctcacgctcgattacttgatgctcgaataaaactttgtgtgcgacgcaaggttccgagaatgcagacaactttcattccagttttagcatatctcaacgggattctgcctacttgtagctcaacagatctgaaaccttacgatatcgacaagaatatggtagacgcaaatcactccttccgaattcacgaagacgaagctcatgacctgctcctccaactggacatacagtctgacgatatcatcattgggactctcaacaagaggagactgattatcgccctcgacttgcctcggacgttcgtgagtcgagatttctgtgcatcatagtaatcatatttcgcgttcgggtctcacacttggatggcagcctgtcgatgatgagacacttcttacgaagtatttgcaatggattcgggaagacatcatatggcacatgggatccttgaagcagcatgtcactggcactgatataatcttggtcaataacgctctcgtcgatcatgacatcctggaacgtttgaaggaacatcacaatcttactgtcccggcgccgttggtctctgggggctctgaatggcacgatcttccgaccatcttacgaagtatatcgaacgcagatggaagtcacctatattgagagctgatacggtcacacgaaatttgctcagtgaaagcagcagaatactcgatgaccgcgagcctggtctcagtgcagcctctcaaacaggcgtatatgcggcaacctctggctcatcagatcgacattgatttcgtcggtcaacaggatggctttgcgtcgcactacgctaccttgattcacgaagatgtcagcacctacctttctgaccgatgtcaggagcctttgacggccattcgagtagatacgaaagtctcagaagcagcaaagatcacttcggatgaaccaactcgaattcccgtactgcaatctgcaatcaattcccagtacgttttcgataataggcgccaacgaggctttgtctccggatcaaatgaagcagcatatggaagcatcgcaatcagtgagccacgtcgcgtagtagtgtgaatctcatattccattttaatcaccactccgtgtgcttctagtccatgatcagtcggtctttcagtccttcaatcgatcgagacagtgtctatggcgggcgagttgccgaccggcttgaagttgataatggtgtgtgatacaatcgtgaggaagagattctagatgctgattagacagatcagtcatctctgtctttgcgggtattgccgatattcaaagacgctttggcaagaatccttgtcacaccttccatatggtcgggaagtgccacaggccacactgcacacaccttcacgacgaggttaaatttactcaggcggccttacagcagtatcgccagcatctcaacggccaggtctgcccgtacggtgcatcctgtaactatcggtggatcggcagatgcttttactgccacgattgtcccggcggggtcagttgcaagcttccaggatgcgaccatattcatccgactcgggccacaaatatcgaccagacgcatcacatctcacgaccggcgcagaccacttacagtccaggctcgaccccacacaagacgaacaatacgataggtaagttctcattgctggagtgcctggcagggctaagctgagtgtgctttttcgtggaacaaggcggtccaaccgacattgaactttcccaggcctggcaacaagagtcctaggcgcttccacctgatcacgagttagtattctattgcccagtcatgcgacgtgcactgacaccctaagttcagaccgaaggatttcgtccctctcatccgagctattttcagtcttgcccggaccaagggaaactccaaggtgctcagagctcaggtcgcgcccgtaatcaatgcaaacacacctggccgatcggtacgaagaagtaccttgatttcaagatctacagtcaagctgccgcgcgttgcggctatgtcatccttgggactaacgacgtgccgcacaacggagcggggtggatccagtacacgggtaaaatggaggctgcttgtggcggtaagtagcttgtgcgtgatatctttttctggactgactattcttgtaatctaattagttcgccctgctcagtaaagtcagaccgaccgccgtaaaagaccatgttttggcctggatgccgttgataaccacttagcatatgagcagtgatcccgattattttatgttggctccggtttgatgctggcagttgcattgtatgggttagattatgtcaaaccgatagaagtcctatgtctttcttgatagtgccgcaggatgagcctctaaagatgaatttcccatctgatcatcgacatccatcgtcgttgccgcatttatatttacaactactaattcccgagcccgtatacactcaaaccctacgagacacaaaccgcattactacgctcgacgaaagctaatccttgctgtcatgatatcttgtcgtcgttaccgcctgttccaccggttttggtagcacgaccggcgcgctacaaaccggacaccttgccgaggcagaggtgagccattgatcgatgcattccacctgacaacgtcgtgtcgatgtcagtaccatccctctgacagccggatcgcctaccgactcacatggaacacatggccgcattctagcagcctcaaagcatgctccgattcgctctcctccgtgtcccgatcggccgtcctggacccctcgacaaagtctaccaagcagatcgaacagctcgccatctccctagcaagtcggatgaccggaagggcgtatccttctacccgctgcggccggactaccagtcgttttgtgcgagggacgactttgcgctcggccttgcgttggaaaaaggtccgctttgccggcttttcgttttcgagcaagtcgtcacgctcggcagcctcgaggctctcgtcggcctgacctggtagcgcggcgaggtagacgacccttcctagtccttctatctcggctgtatccatgggtttcggtgggagagggaaaggtaacgccggttcaggcaatggcgcgacgaaaccgaaccgcctcaacaagacctgtatcacgccggacacacacacaagaactgtgtcagtatgacactctataagcaaatctgcgtgcgagtcgttgttactgacgaggataccgggtccgacaacgccgacgacgaggactaccatgacgacttctaggagcaagaaccaaccgacaccgacgacgaccatgacggcccaccacaacaacggggccgaccgtcgacacgtgtcgagcgaggtgaataggagtacgttcccgtagatgaacagggcgagggagagtaaccctagggacattgagattctgataaagtttccgacggggtcagcttaggggttccagcaggaacatcgtaaacgagcctctgggaaacgtactttggggccgcccaatccatacgtcgagcgagtcgagtccaagccgaacctcgttcctcctcttgcagttgtcccctctcccggtgttcgtcctcgtcggggtaagacgccttcctctccgacttgcctcttgccgctcgaacgtcatccacatgtgttcccctcgaatccttgtatagcatgggtacgaccgtcgtcgaggaagactgtcgatcttgccgcatgctcggtcgagttgattctgatgctgtattcgcatttggaagctgaccggtttcggccccctgttcgtcggtctcttcctttttccggcagacgacccagatgctgacgttccagcatacagccagtcggatgatggacgctatgatccacttgtccaacggttttccacatgcactggaagggacggctgattgagtcactcccgggatgattggtgaaacttgataatgggcaaggatgaggaggactacgagacaggtgatctgaagggaaaatcgaatccggcgatcgatcagcatcgatggttctttacgagtgacgactcggacccgctccgactcacctggctgatcgctaagcctcccttgaggaagaggactccagagcgactatctttgagtttcttgtaaccggccaaggccagcttgatcgcctgtgacctcgtttctcgaacccacatggcgtcgtcgtcgttgtccaccgttctcgcggccggctcgatacgggtcgtgagcgttagcgttccagagggcgaggaagatcgccgtggtgaaaggtcgtccatgacgccggtatcctactactatatgcgactgtatgctatcagggacgatgtagaccgtgtaggtcagggttgtcgtgggcgaggcaaaaggtcttgatgtaaacgggctccgccggtcgtcgtcgtcgtcgtcgttgacccgtccgtccaccctttttgccgatggcagggcaaggttagacgagcgcgccgcccttttgagaccccgtgccttgccttgaaaaaggcttggacagcctctcagctcacttggtcagcggtccaacgagagcatgggattcgaggtcgacaagcacgatactatgatactctacatacactgctgacgtcgttccactgaatttctgcatactacgactgcaacgtagcccttggttatacgttatagacgatgcccggtcaacatgttaaatgcacgcaacaaactcatttagtgccaatcaatcgattgctagccagccctagcccagcccagccagcccgcgagcgagcgaggtacaaagaccggccacacacacaggatgaattacttccgaaccgaaaggcaagggccacaccatacacaaggttcaataaaacttaatatcggttcctcgcacacaacacacgcaagcaaaaccatgggaatgcagggggggtagggggggtgagaagtagtacagatgtaaacaacgtggtcaaggagggatcggctagcagctggaacctgatcgaaaatacacggattatagagtagtaggtacgcggcgacgccaagatcggatatgcatagggtaaatcgaaacagctatggtgaacagggtaggtggtaggtggtaggcgcaagcatgaaataaaatctgtcgtttctcctctttttcttcttctcctttttggctttcgatttccttttcctggttctgaattggcaagcgtcgtattcggcttctgaatggcggaggggcgtgggcggggatgacttggtcgtaaacgtggtcgttaaactttgaaactcgattgattcgctcggcgaggggtcgacggcttttctcccgtctcgcccttcttctcttctcggtgaacgctcgctcataaactgctcagattccaatgcgacgggttcggatcgaatccttcgtcccatttggaatctgccagtccctcggtgagccaaccgtcctcgccaaacaggtcgacgtgttgctgcaccggcgagacggtcccgatcggagctcgatgatgatgcaccggagcgacatgccgaggcgtccccgtcgctccctcggacgacgggctgacttcgaacctcggatcgccgggtccaagtaggtcgggcgtggccgcaataaccgtaggggcgctctcatcctcctcctcgagtgcgctaaagtcgataaatgacgaatagtcgaatccctccgttacagggggaggagcactcgccatcttggccgcgaggggtcgggcagcaggcacagcttgagcggctcgcatgcgcacggtaaacgtacccaaagagtcgtcgaacggtaccggcacatcgatggccagatccgcattgacggcgtcgagtaccgactggtcgtgccggctcaacacgctttccagacgtttccattgactggccagataagccaccgggtcagactgggcgtcgtgatccgccttgatcctagcctggaccatttgctcgcccaaccgcacacccaagatgttgtcaggagccgacaacaacgagtcccgcttgggagctgctacctgtgcggtgccactttccatttgagcgggcgacgcagtcagatctaccggtgtcgactcggcagcatcaacatcgatgggctcctgaggcatcccgttgttcgtcggctttcgctttcgttttgggaccggacgcttggtctgaggcggagaagccgcgttccccgtcgattcggcgtccgtcttgatcttgatcggcgagccagcagcgggagaaaccttttcgtccttgactttcggattctgtttctggcgcttggctggtggtggtttcaggtcctcgatacgtagccgcgccgcgatcactggagtgttcgcggcaggtgactgcttgacatgcgctccgtcagactgaccatgtccttgtcccgcgccgggttgttgacctagaacgccccgcagtgcgatgcccagctgcccgatttcctcacgtagacgttgcagatggatgatcaactccttctgaggaagaaatgccactctgttcttctcccatcggtcgccaaggaatttcaagacggcagcctgtaagggcgtgacgttgattagggtcagtacagaggcagtggtatcccgacagacgtaatactaaccgaggtgaaggcggtgctggtacgctcattggcttgccattggggattacgagccaacagaatggtcatcattttgtcaaattgtaagacaccattctgggcgtgctgaatcaacccttggtaggccggttcttgatcgggtgccacggggtgaggtaccatgcctgtattcgcgctcgggctcagtcatgtgcccaagaataaaatatgactgcgaggcttacctggagtcggatcgtggtcactatacatctgattgatccggttcttggcgatctccaactctgctgacgagacaccgctggccgcaggattgctggctgatacggcagcaggcacctgcccttgtaccattcccgcttgttgtgacaactgcaagagactttgttgcaatctggcttgtgtttgaggatccccatgagtctgagccttcttggcaagctcggcgatctgttggcgctgttccgtaatactccggtgttgctcaggggtcagaccgagagccatcatctgttccaccgacatgttcaaagggttgatacctcccggtagaccgcccatgtaggcatttctgggagaagcttggggtgggttgctcaaaccgatgggttgcgacgagctagggacctgctggaaaccactattcgacacgtttcctgcttgctgattggaggcagaggcttgcggggcttgtcgctgctggttggtcagagtgatgtacgcgctctccactggcgcgagaacctctcggtagatgcgagcgagctcctgcgctacttctgaagaagacaaggcaggaggccctggtacgtcgacgaatcccaacgcacccccaatcatgctccagatgtcctttgacgatacctataccaagcgactgtgagtgccacgttgcgagatcattacaggagaagttgtggcgctcacctcggcatgaccaccgaatttacaaacaatcaaaaagagatggtaaggctcgaccttttgtgcttcgacatatcttgttgagatgtcgatgcctttccgcgactgcatcgccttgatcaatccctcgaacatgtttggtggcatgggcttctgactctgcagagtcagcccggcaaacgtggccgctcgagggatcgtcgaagcattggcctgcaagcttgccatgagacttgccgcgctggcattggcctgttgcaattgtgccagtagttgaccgttgttgctattgccagtcatattgccattattcaggtcaggcccctgagatcgattagctgggctctcctggaattggccgaaagaaggctgcaccggcgtcgtgccattgggtcgctgctgattgagctgttgggtctgtgccaacggagattggcccacagccttacccatcagcacgctagtggcgatccagggtcagccactgtaaaaggtccactctgggcagctttgcggacttactttgtaggcaagcccagagactttggatccagaccgcgtcgggccatctccttcaacaaaccgttacggaaaccatgtatcttggcgagggtcgcctcagctggtggcctgagattagattcgggagaccaagatgaaatttgctgttgacacactcggttctatcagcttcgcccggcctcagaccgttcggtgacccgactcaccgcctcagtgctccggagttgcgtattgagtttgggtatcatcgacttggcggtactgatcaattctccgtctgaaatttgctggtacatgcccgccccatcaatcatgacagcctgcagattggtcatattcggcaactgagcgttcgccatcatggcagcctgcccgttggcgttctgttgctggttgaactgattctggttctgattctgattttggttctggttctgaatttgattctgccgcaacatttgggcacgctgctgctgattcaccatggccgcttggttctggctcatctgcatgttctggttctgcgactgctgctgagggagctggtgggcattctgcggagatgccaccgagccagcggtaccagaggacatctgtctaggcagattcgggccattcggtagaccaagacgaccttggtgagatgcgtatatcgagcggagctattgcgatcatgaccgatgtcaataagtttaacagcaggcgacaagaagatttcccgaaacttgcctgattcatgtgctgctcgttcatgttagcgggccatccagctgggacctgcatgtcctggccgttaggtccaaccggcccaatgctgttctgtctggtactgttgccctgcatccacatccccggtgtgtgtgtttcactgcccagagctggtgagctttgtggaagagcattgccggtctggggggtcttgagaacatgctgtccgcccatctgaggggtctggagctggactgatccgttctgctgagcctgttgctgctgctgttgttgttgttgctgctgctgcatttgaagcgcctgggcttgctgttgtgcgtacattttctgcaaagtttgcatctgcgataccgtcaacccttgagcgttgggaaggttcagcttggccgccaagttctgttgcggttgctgagcctgttgcggcgtggctcctccttgctgctgctgcccccgggtgatcgtcgccatactgtgatttgcgaactgccgcagatcggccggcgtcagcgagccattctgttgagactgctgttgctgctgttgagactgctgttgctgctgttgctgcatctgttgagactgctgctgttgcggctgctgcgattgctgttgcggctgttgctggttcccaaactgcatcgcttgctgaccctgttgggcggccaagctcctctgctgattatgcatgatcaacctgggcgagatcccaaaacaacgatcagctagccgtctcgcgatcgggacctgtctgactaacctctgcagctgtgctacatgttgcggatcgcctccgacgttcaagcccatattctgcaacctcgtctgcgcctgggtctgaccctgaccctgagcttgaccttgctgttggttctggccctgtccctgaccgttcccgccttgcatgttcatcccgctgttcccacgcatctgttggggtcggccgttgccgccaccctgcggacggatcatctgagggctttgctggttgacctggttctgttgttgattcgaggcagatgcgttttggggcatctgctgctgttgttgttgagagatgacccggttgtacgagttgatcaagtgggcgtgggggttgttctatcaaatggtcgatttgggccaggccatcagctcgctcgctccgaacgaaaggaagcactgccacctggactcacagtcgtgttcccttgaccctgaacctgtccttgctggcccatacccagacccaaccctagcccggtatttcctcccccttgcagcatgttctgcataccctgaccgccttgtcctcccatgcccatgcccatcccttgaaacatgctcatgtcaatgttcccaaatccggagccgatattgccgctaccattgttgttattgttgccgccgttcgaaccctggttgcctcctccgttctgattttggttcaggccgttcagattgaggccagatgaagcgatcaacgcggacaggtcgacgttgttcagcccgaacaggctgttgttcgcttgattcgggttcatcgtgggacgaccggatttggcgaaatcaggcttgcgagatctttgaaccgtctcgttttctattgcaactgccttcgtcgtgaacgagccgtcttaagagggccgaaccgtcattcgcgatcgcgtatcctggatgatcgacagagtagacgttggccagatcgacacgagctgtcggacgggtcttgtgctctggctagagggaactcctagatctcgctagtcttgaccactggtcctctctcgagggtcgactgtcggtccgtcctttcaagctcggttggcgttcgaggcgaatacgagcgccgtgtctgacgattctttcggaatacgttcttcctttgacccggatgaccgatcaaggatcggatgagccgctgtggagagggggagaggccgagaggcaagactgcaccgcggtcggcagcagggatacgtcgatgccaaaccgagaggatcggatcgcgacaagtgtttctagatctcctccgcagtggttgagcctctgtgcggggtttgggatctggtcgtgctgggttcgtgaaatgctatcgttcgactgctagctctacgtcaaggtcgtcacggccaatgttggatcgagacgagatcgtgtgggacgattgtatgtggtcgatgatgtcgaggtcgaggtcgagatggtgacgaagtggttgagtaagtggtggtagtgggtgggggtgaggggcgtgaccggccccgaccacgaaatgtcaacaaatgaccggcataccatacagggcagggggaggggtacaaaggcatcccggaaatcgtctccttatcctttcccgcaggatatacacgatccgtacctgagcatcccgggtacacactctaagtgccgctcgtcgtccttgccccttcccccttccccaccccccttctccaagcgctcacggcttgcctcccgtcaacgccgtcaagcttgcaatgctcacgctcctcgtatatccctcactcggttccttaccgaacgttcctggctcgaccgaccctctccgactaagccgccctgcaccagcgccggcagatgacggggctggcgatccaaccaggtaacctgggagcgcggacggagcttccagagtcgtcgacgtggttcgagctgggagaaaggtaaacggagagggtgtcatcgatcttgatctgtcggcgagaaaaggatcggaccgtatgtcaattcatttgcgaatcgatctatattttaccagcgctcgggagtcgactcacccggatcctcttgtcctgatctcgtccgtctccaatggcggtttgtcccgactcgccaacgtcaacaacaacgtcttcagattgggcaacgtatgcctcggatcctgtatcatgatacccgcctggatcatcatctgttcgggaagagcacagtcgacctcagctcgccgttcgtctccccttgtttgtaagatcggtaaggtcacaggagcttaccatttcgatgtccttgttgagcaggaagatggcgtattcgtatcgatagcgttcgatccccttcgaatacagtgggaaactggcatccgcatccgacgcgacattgtcagcctggcttgaacccgtgatcccattaatctttgagccccggaccgactcacctcctaggtccggtgatgaccgagatgttatccctgaccaagctccggcttcccagacaagtcaccgggtagagcaagtcttccccggtgatctccccgagccgttgcacgcacattgctaccatgcccagcgcggtcgccgtggtctcctcgtcgactttgatcccggacggtaagaggttcgaagcgatgttggcgggcggagcaggtgatttggggtcagtcgggataggcaggggtacggagaggatgctatacagcaacgtcgaaggatcgagtgggacgatgggaaagatggcatcgagcgtgttgacgagtcgagctcggtgtcgatgagtggccggggaaagcgccttgcgatcgtcgctgcaagccacactcattgtcagtctcgaggccaagctacggaatcgccatgacagactgacatttcattaccgacttggccatccaaagtatcgatttgctgatcaagatccgcggtcacatcgtctgctttgtgtaattgttcacgtcgggctgccaagacttttcgtcgttctgtacaagcctttgcgacttcggtttcggcatttcagtacgcgatccaatgtgcgtgctgtagagaccgaacattactcaccagcctcgttggcctgacgcagtccatcgattcgaatttgcaggttagtgttatcgttctccttttgagcctggtacttgttctgcaaagccattgagataagtcaacctcgccccactcccgagcgagcatgacaagacgaaccaggccatccaactttcgatcctcgtccatcgaagccgtgacccggtcttcgactgttttgacctcggcttcgccttccttcagaattctcgacacggcgacaaggcgttccagaccttcgaggtcgactgatttctgcattttcgtctcgcgcatgcttcgttcgacgatcgattgtatgtctcgacgtgctggatgagggcgggacgtgccactttgctggtccggagcggtgtaaggcagataaaaggccttggatgatgtctgcgagaaccggaatatgagggtattgtctggaagttgatccagccgctgcgagaccgttggtttcaagtcagtctcagaaatcctcctctactgttacactggcccacctccaacttacgtcttccgcgacctctcgcaggctggccaagtccacgatccctccaagacctttcaattttgtccacccacaacccttgccctcatcttgtctactcgactcgcaccaagcttccagtaacacctgatgctccgcacctccacctgtggacccgtacgcccagtctgcaaaatcactgttcacgctgacccctgagaaagtaggatagagcgatttgcggtggatgggcgagatgtagaatgggcacagcggtcttggcttttgcttatcgcccttgtccctctcgtcgacctgccttggagccgcgtcgacgacctgtagctcggattttggattcggctccataccattgagtgtcgtctcgctagatctcctcgagttgggttgggtgcccaaaaacgagcctgacctcatgctcggactcgttggcggcgtgctcgtcctcgagctcggcggggaggagagtcgggccgctcggatcggtgaggagtctctgtccggcagtgcatttgagtgcgagaacgagccagctcggagcgtattttgtctagaggctggcgggcgaatccggccccctggattgacggacggcctgctgggcgacgggaccgtcgtaccggacgagagggccggacgagcaggattggaagaatttgcaggcgagtcccgggacgtggatcgcgattcccctcgggacctcgatcccggtgacgagatggtcgattgaccgttccgcggtcgacttgcagctgtgttgccattaaggactgtaactttgcgcccgcttccactcgaacgcctgcttggcccattcttgctcggttcaccatccggccgtcctggacgaccagcacaagggaccttgacgctgcatgcttcgtactcctgctcatgctttaacgccgcccggaggtcttcgaccaagatcatcgtcacgaaacacctgaccaattctttctcttccctcaagacagcttcgtccagctggaaagccggctccttgccagacccctcgtggtccttcttttcgtacccgagctcgtccgtcagcgtgacgtgtccggttgcgttgatagcgtattgcgagacgatggtcgacgctctttctctcctgcctcccgcacccagactggtagaatgctggcccggcggatggtggtggtgatgatactgatgatgtgccgatcgaagcgaagatatggaccctgaccgggctctcgattgaggtcccatatccttgcttccatcctgtatgatatcaattcccacagctccattctcggtaaaggactccccgttcgtctctgtcggaggcctagggacgatcaaccgactccgactccttccgtgagtggacaaacccggccttgcgccaaaccctctcgaccccgcctgtcccgcagaggtcgaatgctcggtgatcgtatcattactcgaagctcttctgggagcgagacacggtgatcgagagatccgtccgagggaagaggacgaggtcgagcgttccaccgagtacgcgccttggtttggcgacgaccgcgagttgccatcaggttcttcttcaatgaccgggacttccccgctgatccggtcctcggctatctcccgtacgtctttcaaggcataagggtgtacgcttccctggcttgtccttcttgatgggcgggtctcgtacatgggcgaacttggttcttcgagctcggagttgaccgtgacattctgctcacacgagaggtgagcgtgaatgtcgagtttgtgaatacggatctcggtgatgtgtcgtatccggggctagattgaaagacatttcttgaaatcagctattgatagtagagcatattcgaaaccatctgatctcggactgacttgactgagcaagtctcgaggcatgccatcaccttcaggttgtgtattcgaggatgacatgacggtccggttatggcttgcgagccgcagcgtttcggtcaagatccggtctatcgaggtctatattttctagcaccgagtcatactgaggcgaagaagcggtcttttaattcaattgacacatgcaggttaccatctctgactcagatgtctaggtaagtcattcgatcaatgcatcttgcatcttgcatcttgatgatatgacgcatcacactctactacatctcgcttccaactcgactttgttttcattttgcttccgcacaacttccgaagatcgggtgacccaggcccactcggtttactacttctacatgcaactactagcgatgttcacatcgtcttcttctagctttgcctacttgcaacggtcgtatcagtcatccaagttcacgtctaggtcgatactcatctggaatagcccggtcgctgcaccgaaaccggtcatcctggagggcggaacttagcatgctctgcacccctatccacggctcattcatcgcaagatccattcgacgtctcactcgacccggcccatctattcagttcgatcgcaaagaatctttcctcatctcgatcaggcatttctctgttaccatgtcgaacaacgccgagaacaggtcttatagcgtgagcactcgcatcgcgtcatccgaccaggaaaagccaaagctgacgaggtgtttcggacttgacaggaagctatcgagctgctcaattcttgtcaatcgaatgccgctacgtgagtcgttaaaaatgactgcttatccggatccgttctgatctgctctgatgtttggcaggatcgaagctatccgcaagtctggcggaaagctcaatcaatatgccatcccggagatgatcgaatacctacgtcgtatcggctaccgcgtgagcgatgagcctatctttcccatctcgcgtgctgaggattgattgacttcacgtactcgttgacccagcccgaagatctgaatgccctaaacgtcgtgcatatcacgggaaccaaggggaaaggttcgacgagcgcgtttgtcgagaggatctgtcgtgggaagatacaggaagaccaggcggataaggccgggaacgaggagacgagcttggacagatttgaagaggacgaaaagccgtgggtaggcggtatcggtgagtcggagcacgtactgatctaacccaagcctgttgctgacaatgccttgcatccgaggatccaggtctgtacacctctccccatctttgtgcggtcagggaacgtatccggatcaacggacaccctcttcctgaaaagatctttgccaagtactttttccaagtctgggaccgactttcctctcacgcctcgaccgacccatcgcacgccctcgaacccattccggattctcacgtaccccaggagcactatgctaccatccccgagaaacccgtctactttcggttcctcactttgctatccttccacgtctttctttccctcaagatcaagttgaccgtgttggaggtcgggatgggcgggacgtacgactcgactaacgtcgtccctcgaccgctcgtcaccggggtcaccgcgctcggactggatcatacgtttatgctgggtgataccgtcgaggagattgccaggaacaagggaggcattttcaaagagggtgtgcctgcactggcggttgtccaagagaagagtgcgaagcgcggagagagcgtgctgaaagatagagccgaggagttggaggtgagtctaatttatcggtgtgcctcactaccttgtaaaaattgacgatgaacgctcgacgatcaggcttcctccttcgacttggtaccagtttatccggagctaaaaagtctcaaattaggtatgcttcgagtctaatatgtctcgatcgatgtcgcggttgctgaccgcttcgattcgcaggcttgcctggctcccatcaggtggtcaacgcatctctagcggtcgccatgtgcaagaccctattctcatctcccgatcttccccccgtcttggcgccttatcacgaagaagcgtccgcttcggacgttcccgactcgtatgtgcgctacctcgaacagacgcgatggcccggtcgatgccagaccgtgatcgacccgatctcaaacgaggacggacagacgacttggttcctcgacggatcgcatacggtcgagtctctgacatcgtgtggcgagtgggtgtacgggccggatggcatggcctcgcctgtagcggaaggaggtcgccgtcggcgcaggatcttgatcttcaattgtacgtcgggacgatcagcctatgccctcctcggagcgttgttggatgctggcaagaaagctacgggcaagtcgtcggcagctgtaggaagctggtttgatcgggtaatcttttgcaccaacgtgacctatgttgacggtcatttcaaaggcggtgagtggtgtttcacgtcgtgcatgctctgaccagggctgatcgacctcctcgcgccagacctcacctcaaaggccattgaccctaacgacctttcggcgctggcgacgcaacatgcgctctcagccgcatggtccgagctcgtccctaccttttccagggagcgggtacatgtcgtctccagcattcagcatgctgtcaacatcgtacgcgaggcaggcaaggggaagaaggaagacgttcaggtcttggtcgctggaagtctccacctggtcggtggaacgatggaggtagcgggactagccgaacgagcgttgagcgtagcttgagtccgccaatgtacaaaaccgaaaggtcaatgtaaacaattgaaagaatgagcaacaacggagcggagcatgtgctaaaacgtcactcgatgcgtcgagccgcccctctcctccgcaatttttttcccggtctgttgtctccggtctttggttcctcctcttcgacattgcccgactaggcccaggagatggactcgccggatgatcgtcatggttgaatggatattcttgacacgctcgctcacgtcgttcctggtcggccgagataggaacgatctagggacgcacgagaggatctcatgttgtagcatttcacgcgctcctgccagagtccggcatcaggaaggcttatgtcaaatagagaaacatcatcttgcgggccatgaccgcatcagtcttgttccccagacccacaacacacggtcgatgaatgacgagcgcatggcattgatcaagctccacgagaatcaagtttcaacccatgctggcagtctaaaaaatcggtgccttagatttgcaagccatttgtaccgaggctgggaggcaatataccagcagtttcgtaacagtccagcttgtatgaggatcttggctctttactcgacgaacgtgattcgcaggaaacgggtactttcggaggagagcgacgatgacgatggggtgagttcgcaacttttgagcggattgccgactcatcagccttcaagccatcaattggcctcttctctcagactctatgtccacctcgacgtcactcgaatgattcgtcaggggaatacttcgagtcgtttctgagagactcagcgacaatggcaaaccatcggtcaacacgtctggcacagctgaaacctttcaaactcgacccatcctgaaatgcactcttccatctcgctgagcggaaggcgacatgacctgaagttgccctcactgtaccgcgtggactatcccgccacacgaatgctaaatcgtcggattaatccaccctgctcgaaccccgatcggggtacatgcttgtcatcctaatacttgaatacggtaccgcactgtatctaggcggcaggagaccccgcaaacgccctctccctctctgcccgtgactctttgagcgcagagaccttttcgtccttggtcgcgttgtaagccaccgagacctggttgaaactaggagcgttcaaaaggcgatttaaaaagacacatgcgcaattagtgacttggaagatggacgggcggagagaggttacggcgagggggcactcacgggttctctggggctttctggaactgtttgtacagcatgtcgtgcatctgttgtttacgaagcccaggatgagaccgtttgagctcgggcatttccttctcgaggtaagcctcaaaggcggctttgaatcgtcgctagtaggaatgaccgagattatcgagagtcagcggggtgcgcggcagggttcgacggggacgatgtacctcggggtgtttctcgatcaacccggcttgagctcctacgctccccttgtcggccttggcgttgacgatctcgagagcttccagcatgttgtccaacccggtggccttgatatgaacgtcaggctcgggctcgaacccagtcttgtccggtgtcgaggtcccggacgctgcacctcccagtccacctccggcggcgatagctcccggtccggcaggtcggacgtccttcttcttctcccccgatttcttcgctcctccctttgtcactggcttggaaggcaagctcgcttcctcttcggcgagcagggcggccttttcagcctttttacgttcggcctcggcagccttttctttggccttgtcggctttcgaaccgtctttggctcccttggaccattcttcggcttcctgagcttcgaccttggcagaagcagccgactttttcttgttctgaagagggtcgatcgggggcggagagtgatgtcagatcttggtcttgctctctcggagagtcatgcgtgggactcgcctcgttctcttcctttttagcccttccagcttcctttttcgagtttcctcctttggctggtggcatggtcgatatctattcgagctgactattcgtttcagatggtcgtgtgtgttccctagtcagtggcgatgatgatggcagtggttgtgtatgtaaatgtatatatttcgggtcaacgtcgagatttacctctgctttggcctgttgcctgttgatgatatgtgatgacgaacccgcggaatcaaaaaaagaaagagacaacaccctgttcgaggtcgttcccgcaactaccctatcgggatgataggatgatccagcacgagctacaccgtcatcccggcaggtggttgtagaagaccatccaattcattgcctagctcgaaaaagtgaaaccccaattccccaccccgagatggaaccacggacatcaacaccgagcaacattccgacgtcgtacgagcatgttggcataccatgaccatggtctcgagctgaaccagatcggttccacgtcttccttggcgttctaaacagattcgatggagactctttgaggagctacatacgaaaagtttgtccagcttgactcgtctcggttggctcgtacggacgagctgacgggatcgacgttcgttccattcacagttgttcgagacgaaccttcaaagtatgccgggcatataacatcggtcacacgattcccaaaaacctcgatctgatcgagaaatctcctcgcggttttgatcctcgtagatgttgaattcgacaaggaaaagaccagacagcatgggaaagagctcagcggggtgagtcccgcgatcacttccgagctttgtttaagagtcaagttctagagcagctaacccgtccatcctctgtcctcttgtttcgtttaatcacggattcaccttcgctcaataaatgaccgccttgcgggatctccggcaatgatcgatgacctctcatgatcgatagcggatcaaagcgaggatgactgagctgaatccacacggctggaagttcgcagtaagtgccacataccatccctttgcgggtaccttcctcggtcatacatcatgaagcaggcagcacgaccaggtcgtatgaattattcatgacggagaggaggacaatgacagtcgacgagcacgcccgcctagagactgtcgaggctgaacctttcacttttgatttgatcgtgacacaaggtggtcatccagatcaaccaaaatcttggtcaaggcggccggtaagaaccccgctctttccatgtccgttcgatcctcctaaggtcctgggacactgatacgtcttacgtctgggtgcgccttttttcgaactcgattcggttcgatgttggcagggcggatttggctacgcactgggcggcttctgacctatgtatccaagagctctggtccaacgtgagtcggtcctcgtcgagcgcagagagaataggaagagggtagtcggaactgatcataagtgtctcgtccgcaaaaccaaatttgaaggaacacttgttgtgcgcgtgtttcgcttttgccatcaaggcgggctgagaaggatcagattagaggtagaaagggtctcgtgtggactggacgggcgggacgtatgtgtaaacttcggagaccggtcgaatcatcagatacccattttatgatcaagggaggtcggtcacccggtctttcccactggcaatcgctgcatcaacttcaaagtattccaaaagtctgcctacagtcggggcagtgaaagctcgctcgtgtttactttatcggtcttctcggggtcgacacacagcgacgggcatacgtcggtgagattcgccgagcgtatctcgggggaagaggaacgagatcgaatcgactgagataccgatctctggtcacggccttctgggtcggaggggtcgttgttgttgacaaatgggcggcaggggagcgaagtaggggttggtcaccctcccggtgagactgaatggttgccgcattgcagccatcgggtcgagggttgatcgacatgggaacccgctggacatcgccaagggcgagtcttttgccgcaacgagagtcgatggggggcgatggaagtgggcggatgaagattgcggcaagtgacgcgacgcgtggacaggggcaggcgacgctggaaagctgaagctgaagcctatgatgaaagagtgtgacgcgtgtggcgggaacattgagcctgagcaaggcaggctaccgagggcagcagcagcaggggggtgacgaatacggaagcttaccaccggtcggtacaggctactgtttggcggtagggaaatcagagtgggcagggggcgagggcaagcacaggaagcctggggggcgacgcaacatccgctgaaaactcgcccacgaacacacacggttcccatgtcggatccaaggctctcgacttcgatcccaatccccaaaagtactaaagaacccaacgctgcacacacttcgtcgcggcccacatcaacctctttgcttcctttccctttaccaaaacacgaacctttactcccctatacccgtctataataccaaaaacacaacctctttttcaaaatgtccgactaccctaccgagatgaactctgtcttctacaccggagtgagttttttggtcgaaacccgccgagtggccccgggtcccgttcgcgatcgctgatccacctcgcttcgcgcctcgcccctgatcgtcgtcttgatcgtcgtttcgtgatgacagcccgagaagttcgagatccgacgagtccccgtccccaagatctctgacgatgagatcctcttgaagggtgagtctaatcaccctcgattcgatcgagttccgcgattcggaacaaaccgacttaccccatatctttcaccgccgttgttcacttctagtcaccctctgtggtgtctgcggaactgaccagcacatccacgagggagagttcatgtccaagttccccctcattcctggtcacgaggccgtcggtgtcatccacgccgtcggtaagaacgtcaagggactcgaggtcggcgaccacgccgccgccgatgtctgcaatgcctgtgccgacttgggtttgcccttgtgtcactactgcaagtgagttcgctgcaagtctcggcgaaaaagtttgtgagagggtgctggacagaacggtcggctgattctccattgtgcgtgtttgcctcgcgtcctcaggcgaggagagcccttgttctgtgaaaacttctctgccaagggagtcgccatggacggtggattcgccgagtttgttacctagtacgtgttcagacacacgcctgctgcgaatcccgcgtcacgtcgtccgtcgctgatcacgtcccctttgccgccccgcctccccttagcaaccagtccaaggtcttcaagtactcgaacatctccgacgaggaggctaccctgctcgagcccgcttcgtgcgccatccacggtctcgacaagctcaagcccaaggtcggtgccgaggtcctcttgctaggagccggccctaccggtctctgcatggcccagcttttgaagctgaacggtgccgccaaggtcgtcatcgccgccaacgacggtatgaagatggacattgctgaaaagctcaactgtggtgacgagtacgtcaggctcaagaggggaggtggtgaggacaccgaggctcagtggaagaagatcaaggaggactaccctcgtgagtgccctctattgctgtcgtccacgcgatcgagtcatgcaccgagactgatccctcacgacgatacctcttacagacggctttgactgtgtcatcgagtgcaccggtgtcgagtccctcgtcgaccgatcgatcgactttgtccgacgaggaggttccctgatggtctacggagtctacgccaacaaggcccgtgtccactggtcgcccaccaggatcttcagcgacgagatcaacattatcggatccttctcccagttctactgtttcggccgagccatccagtacttggacagcggcaagctgaacgtcaagggaatggtcaccaacgtctttgacttgaaggacttccagaaggctttggactgcatgagctctcgtcaggctttgaagtgagtctttcgcgcgccgtgtcgttgttttcgtcgtcgaggaacgtctcgttgaccgcctgtgctttttctctttgtcttgtaggatcgctatccgaccccacgcctaaacggatgtttggttcggaacgcgactggcactttcttgacaatgcgcctagggaagagagagagagaaagtgaagaatgacacgatgagaaaatgtatcccttttacgaagctatttatctgcccggattacatcgattgcgacacatgcgtggggcagacaaccagttatttgcaaactcttggtgacttttataagaatgggcggggttgggggtatgcttgcccctgttgtgacctttggtcgacgaggactgagagggtcgtgccacacgccatgactggggtgaggtgaacatgggtgtttcgtcatttgcttccgatatccaaagagaaaagcatccggtgaaagcctagtagctagacctggctcgatacccaccattgtcctctttatacaaagtcgatcgtcaatgttgcgtgtcacactgtgtatacataacatcgactacgacatactcgccgacgttcacgcttggcacctgccagtcatgcctttgccacctttccagctcccaacggctgagagctccatatcggcagtctcacgcacgaccaagagcaaaggcaagaagaacaacgtctcccaatcatccatctttgacctcaaggggctcgtttcggagcatcaaagcacgtttcaaaaggaagggagagatgctgtcaagggagaagctgggaatcgacgtggcaagatcggagaactcgtcagtcctgcactcacgctcagctatgtactcatcgcgtcgtctcataatgtcactgaccttgatggtatcctcgtgtcgatatgactcggcagtctcgagatcgattctctcgcccgtcacccaacctcgcacgaagacttgcccaacaagcagagagcgatgccaaacgagcccggatctacgatgatcaggatcggatcaccgagcacgagaggcaggagatcatgaggttgaaagcggaacgatacgaaaagctgagaaagggggaagaagcaccttcagcggagagcgcgattgatgcaagtcggtcccactgtcaagtttgggacaccgtctgacctatcactgtgtttcatctttgggatgatagtttgacaggaaacaagaggaagaggaagggtacgatcattggtccgaccacgcttccgatgtggacgagagcgccttggtacccgataacctcaaacacgccttgccattagagaacgacgtgagtatccgcgttcataccgcttacgatacgcattgacagacataccgagtgcatgctgattcatgtcgggtttggcagaacgaagaggtggaatacgtcgacgagatgggaaggacaaggagagggacgaggagagaggcgagagaggcagaggaggccaaggcggaagtcaggggtgcggaacaagaggcgcaggaagatgacccgaatgtgatcggacaagcacacgccgaggtcttgtgagtgggcgtaacacccgggtcgtcccgagaataggtccaaaatatgactgaccggtgaatgtccttgcaggcaatcgaacgtcatttgtaggtcatcttacattgggacttctgctaggaactttgtctgacaaccgctcatcgtcccttgtcgtagatggcgaacaatctttcttccccgtctatgagcctacacaggaagagttgaaagctcgatacaaggccgctgaaggaggtcccatggtggatcactacgacgccaagaaagaaggtccgtgcctcaacacctctcacgttcgtgtgaacgtcaaaaatccgatctgaccctgtgttcttcttcttgcctctttctccgcaatctcgacgtctcgactcgagcagtccgggcgaagggagccgggttttaccagtttgcgcaagacgaagaagtcaggaaacgacagatggaggacctgaaaagacagcgagacgagacggagcaagcgaggactacgtctggcttgggccaaggttcggacgagaccccagggcctgtactgagtgcagctcaagaggccaagaagcggaaactggacgaccggcgagcgttgatcgaagccaagcggcaaaaggtgggtccgagatggacttgttcccgtttgtgtcgttgtcgaaactcatgggggtttctatcgatgatcttgaacacgcagatgcttggaggcaaggaagctgtagaccggaaaaagaaagaggctcaggatcgggcggttgatgcgttgctgcgatccgtcgagcaggagatgcaggatgagaaataggtggacgaatgcagatcgcctgtaagcggcatggttgtaatccgcatggctccacttaaatgacaaaattcaacgacgtggtgcaagtacggttcgcttgactcgttccggaggaactacaaggcgcacgagctggaaatcgagagaggtatcgtcgcaccacttggaggctggccagcattgtcggccctttcaacaacgatgcagtggaaccgaccgtgtcagaaccttaaaggaagctttcaatccttttcgccatggacgaccgatggagacggtgccttgttcaacgacgttaccatatgcgattgggcttcgatccttccgataccggcacgccttccgctgctaaacggtttgtacattgctctatcgttctgaatccgggtggaacaacgacgtgtcgggctcgaatcccaacaaggggaggggtccttgtctctttccttccatttacgcacgacctcgaacactggaaccgagacggccggaaccgaactctaggtattggacccccctcgctcgctttcggtaggttttccttttcctgcttcatgcccggacgcaggaagggcgtgtaattgggtttcgctccttttgagtccggggttgggtcgttctcgggcttggcgggcatgacgggttaggagagcaaggccggcgcttggtcggtatcgtcatcgagatatctctatctcgagatcgtaatcgctcgcagaggcatgtacgtagttgggcccgccatacaaagcaagacacctgcatcgacgggtccgaccatggtctttgcactggctatgatcagcggaatcgtgaaacagccaacgaacccatctcagtccctatccagcccgatgcagcatagatagtcgggagctcggtagggatcaggaatcaggccatcaggcaccgagatcgagaagcgggatcggttttgcttcaaagcgagatagagtctattttatttatcagggccggccgggcgcgcaacaagctcggttttgatcagatcatcctatttcacccgataccggttgggtgtctcgcgaggtcgacgtcgacatgagcgggcatcatggccgtctttctgaagcgctaggacgacgacgacgactgcgaatctcatgaccatctgtctctggctgtactcatgtaccatgcgcacggtatgagatttctgacgacatctagagacacgggaggatccgggaaacccatcaatctcgagcgggggcggcacgacctcggcgggttttttcttttcttttttccccctttcttcaacccacgaggcgctatctcgacccatctgccgctcctggctgccacgctgttaagggcagggagaggaaccggagttcattcatttcgccaaccccggttcgacctcgaggggtaatcgcgctggcttttccctccccctcccccttttgcatgcatgcatgcatgtctcgttcaggagtctgtttggctgtttggtctctgggtggatcgaatagtcaccgtgcgttttccgcctcacgcctcgggggttgaacaaggttatctcgttcatttagagcggacccgatagaggtagaagtagacgtcgtgtggcgtggtagcaacgtagtacaggtagcgtagaggtcaaactagagcagacggggcatcgaagccgacaaggacaaagtgtggcgttgctcttttcaggggcagacacttttctattcgctcgtaaccttctgctcgtgcccatgcccatcaccacagtcatcgctgctcccgagataccctcctccggggtcgttccgttgtttgtatagcttgagatgaaaggatcaagtagtagtgtgcacaagggttgtggagcttttctcctgtgcgattcggctcctcggttcctccttttctttctctgggcctatcacacgtcgtgtcgcctttccaagctccgtcgaatcgcaatccacgatcacaacaaccctttacccagcatactgcccctccattcacgatcgacctcgacgctcgacatccgatcaaaggacgacgaatcgatacccgtaccgacaaaggatcgacgtcgggacgtcatagcccggctcgaaaatagagctaagctataaatcggccttattcatctaattctctgggtaccctctgactctctgggaccaaagcccaagcccgggcccgcgggtaccatactttcacctccgtccccctcgcctcctcctgctgcacctttcgccctcgtcgacccattctcgataggtcccggtaccgtcaaacgttcctacccgtgtctatctttcaccgagaccgacaaggctccgctcggcctctcatctcccggctttgctgtttgttattaaggaccccctcatcgagattaaaaaaagcgtcgtatcacataactgtcatacgactcggctgtgcgttgttgcgtgatcgctcttagctcggaaaccttcggtgccgcgagagacgggtcgaattgaacagacaacccatacaaccatcacacccacacacatacacacacatccgttgtacacgaccacactcacatcgacaatacacagcacatcacctcttgatacccatacctcacatagcacgtaatcagctatcgttttgtccgcctttgcgcccagctttgataccatctaggagaggacgtccggcaaacatggacggtcaacctccgttccggtcgacgcagtatcgctcagatacactaccacccgcaccgtctcccctcgatctacaccgacatcaacatcaacaccaacaccaaccattctcgcggacagcctcatcttcgttgacgttccccggcagactctacttgcctgatcctcccgcgggactgtcgggaccggtacctatcggtggtaggactctgtcattgttgggaagacgatcggtcaccccgtcttcgtcctcgtcgacgacgcatcagccgagggtcgtatcagggaaccagagtctgagttcgctgttgaaccacaatctcgatcgcggtgatcaccactaccacgatcatcgcgggcaggacgacagggtgtatcatcgttcggatcaggtcccctctccacgatcgcgggcggggtatcaggagaacagactgacaggtctgccttcacctgacaactccccgcctttgaaccctcaccatcatcctcaacctggtcaatccgaccatcaacgacgtctggaacacgtcgacgtcgacgtcaaaccgttctcgcacacgaatcggctggaggacggtcgatatcccgtgcgctcgcctacagaacgggcgcgatcgggacgctcggaagattactactcgaggccgaggtcagacgtggacgaggtcgtcgtcaaagaggaacaaggggaacaaggggacgaatcgatcaagaggcagaagaaaaggacgaggttgaacacggatcaaggggtcttgttgaaaaaggtctggagggaggtgagtcgagctggggacgtctctgtcgtgcggatcggatgggaggactgatcgcccgtggttgtttcaccggtagacttgtttccctagtaccgagagacgatcctggttggccgaacagaccgggttgtctgttcgtcaggttcaagtatggtttcaggtaagcccgggcggatgaaaattacggttgggaagatcgaagctaacctctacgatacctcttttagaatcaacgacagaagcaacgcaatgaagagtacgaagcgagcaagtcgttctcggccgatgcgcctcatccgttatcaggtcctcgcgtggcttttgataccccgatcgctccgcgggacttgccagagaagatctaccacgcacaagggtggagcagtatcggtcctgaaccgggtgtcaagaggcgggggagtggggatcgaccggggacttcctcctcgggaagaccgatgacgggggaggacaggggtcagacttcggaaggcagccggacgggaacgggatccggtcctgctccggggccattagcgggggatgttacggatgtgtcaagaggctggagacaaggtggacctgtggacacgccgtcttcgagctcgttccatggaccgtcctcagctccaccgccgatgcagaggatgatctggaatcaacacccactaccaccaccaccaccaccccgctcggcgccccattcgacggacccatcacacgtcgtgtcgcacaagcggacgcgggaggacgaactcgtcgacccgctcggccgaccggtcaaaatgtaccgttcggctgctcacttgtccgaatcaccaccaggaaagaaggacgcccagaccccggtactggaccggttcccccggttaccatctatcagggaactcggactgaacgcggatcgtcaggcgggcatcgcgatggggatgaacgggggcggtgtcggtcacgcaatacaggatagggggctgccaagcatcccagggatgatgggcttgttgagcggtccaggaaggctttgaaagaggatcaccatgttcgacagttgacagtacgcgagtttgacatcatatcgagataccatagaagacgttgtatattactgaaagtcgatgcattgtgctcgagtaccttaccttgcctggaacctcggcgcaacattctggtcactactgaagtagatgacgccgaccgctgagctggggagaatggtcgttgcgccgagccggcttgtgcatcttcgatcattcacgcagttatagctatcaaacactcttaccctcgagggatcactctagtagagtattcgattttccaggaagacaaagcgatggtggtttgtagattatttcgtgtttcggccttctccgtgttttctgatgcaagcgatcaattcgatgacaagaaaaacatattttactttgatcaggttgcaagtcgcactgtcccgaggtatactatatcttatgattatcaagttcgtggtcatacacttgcttcattccataccaggaatgccgcccgtcgctcagcatccggtatagcctgctgaaaagctttgggacaatgtccagtcgtcgggtctggataaacgccagatcatcacttcccgcaacaaaatggccagaatgtatcggaacagccagtcatcgcggtatggaccgtcgcatggcctcaactgtgattgaaagcaagaggaagactcgaacaaggctcgaagatctgccgagcgctgcactcggacctgatggccagcctcgagcgccattaccgccttttggaacgaggtcgactgtcctggcagagggtcggtttgcttcgctacttagataaagttcaccggctgatgacaggcacttttctaccactcagtctctggtgccgatgtttcagctaagcttgacgtggaacaagaactgcaagcgaaatggcagcgagcgatcgagaccagacagtttccggacacgatccttgcccacggaatctttaccaacatacagaaatatccagacgatatcatcctgactcgtgtagggatgttctacgaggtgagtagaggcagcctactgtaagaactgttcacacccgtgttgagatgtcacgcaacccagtcttactttactcaagctgccgaagtcgcagcgatgctgaacatacgcctgacgtccaagtcgttccgggttaaacaagaaggaacctcggggaaaaggtcgaaagccgcgcccgctgtcacgcagcagaagtttccttttgccggattccccatctctcagcgtgaaaaatatttccagatgttgctcgaacagggaagaagcttcgtcgtggtcgaggaaaaggacaagctcgggaccagttcgaaagatcgatacgtcgccaggaggtacaccccagggaccttgttgagcgaggcttggcaggtcaatgatgagacgagacacctcctggctctctcaatcggagaacacagatcaggcggcgagctagaagatacgccaatcggtttggcctatatcgatgtctcgactgatcgggcggtccagacacggacctcgacgctgggcgaacttgagcacgaactagccaggatcagtccagtggagatcgtcttagatcgaatcatacaggattattccgaggcgagtgattcgaagcgttcaccggaggacggacggcaaggaatcagagagatcagttctacaatggctccgctacttcagcaaagcggagcgacgatcgcctttgtcggtcccgccgagccgtctggcgagcaatacattctcgaaagctcggccgaacagctggtacagacccacctaaaagattgtcttttgagcgagatgccgaaacttctcgaggcgagtcaccagtcgactgagtcgttcatgcagatcgatgcatcgactttgcttggcctagaaatccggcaatcgctacgacagtctgtcggtactcaagcaaaaggcgtgtattcatcacctgcgagtcgagctggcactcttctcagtgtgatcaagcgcaccctgacgccgtcggggactaggttgttggtcaacacgctttgtcaaccttcgaccgacttgctagtcatccacgagaggcacgatctggtgcaagcgttcttgcggcggagcagtctgcgtgaagatcttcgacatcagctcaaggccatgagtaatgccgggaatggcgaaataagcaggatcatccagagattctctgcgaatggcagcacagccccgggtttggccggcgctttggctggcgggagagacttgtgggacttgaagcaacgcatcgaagcgataagtcggttgggcacgactatcgaggagaccctcgttgttgagaccgactcctctgcggtaacgcatcggcgactacgcaagttgattgccgagatgaaggatctgggggactgggtggccaccatcgatcgtgcagtggtctcgtccgttttagacagatcggctgtagtgctaggggagcagccggatacagacacggtcgaggaaggccaggagctgatcactgctgaaagtaggggcgtatcggatacagctgacgatcaatctagctcgtggtggatcgacccggggtacgcagcgtgtctcgttgtgcgagagggtttctacagctaacgacatggccaattccacagtttcaatcccctcatgcgtaaactgcacagcaggctgacagagctactacaagaaaagtcggacttgcaattgcgccttcgcgagcagtacggtgagctagacaggcgagggcggccttgagagctttatagctgacaggttactgcggcttcgtccagcactcgatgcgctcgagctcaagatgggtttcaacaacttgccaagcttggtgtacgtgcctaaacgaaaacagacggacttttcgctcatccggaaagatccggagatggcggtattgaacgagacggcaaagaccgtgaggacattcgtgtacaatgtaagccgatgggagccgattcggcgcctgctcagcttatgtatctcgcacagaaatggtctattctagctaattccatcgagcgaacgagagtcaagatgctagacgcacaaaaagaagcgttcaaggtgctgcgcgagcaggtgaggaagatggattcggcagattacactcggccgattcattgaaaccccttctatcagacgctcgatttgcaagatgatcttctgcacaatgcgagactgctcgatgaaatcgatctttgcttggggttcgctcaagtggcagacgagctgcgattcgtccgcccagaaatggaagccgggtgagcgccaggacagcggtcagcgacggattctgaggggcttactaatagttctaccgcacagtgacacctttgagatcgtcaacggtcgccatcccactgtagaatttggtttgttatcgggtcggtcggcccggaatttcacccccaattcgctacatctcgattcggatcggcatctcgcgatgatcaccggtcctaatatggcaggcaagagcacattgttgcggcagatggcgatcgtagccattctcgcacaagcgggaagctatgtcccggcggacaaggcgagattgggtatcatcgatgccgtctttagcagagtaggagctcgggatgacttgtacatggaccgaagcacgttcatgatggagatgcacgagcaagtcgtaaaagcaaacgcatgtagcgtaacacgaggctgaccgcatcgctggtccgctgaacaggaccgcgcatattctcaacaaggcgacgccgcgatcactggtcatcatggacgagtgagctttgtgctcctgcaccgccctttcgagacccgtaactgacgtatgccccgacagaattggaagaggcacgaccttgaactctggcatcgcgatcgcttacgccgctctggactatatattacgacacaacaagagcaagacgctctttgccacgcactatcacgaactttatgacatgctcacgacgacgacgacgaatggagacggccaacgcacgacccgagctggagttgaattctggtgtaccgatgtggacgaagtggtgagacgagtcacagggtcggcggcaaaatgactggaagctgacgtctttccctccaacaggacggccgattcgcatattcgtaccgactgaaacccggcgtcaaccggcaatcgcacgcgatagtgagtagcgcgacggaccgctcgtggacgagatcgagactgatgcgaccgtggcagaaaacggcacaacaagctgggatgcccgaagaattcctgcgactggcggaaaagacgctcgatcaactggaagccaaggaggatgcgaggacggctctcgcgatggagcacggtcgaccaggacagtcaccctaggatgcgaccgaggtgtctgatgaactctgtaatctactctatgcatgcgcctcgattacaggtatgctatttgtgtcgaccgaatgggccgttgtcgataggacgtctcaagacgattgtccaggctgaccaccgtagtacgctccccattgaccggcaccctgctgtgtctgccaataggcggcctggagcgagaggaagaggtcgatgataagggggttcaggtcatcagcgacgcgatcacgaggggcgcaggatgtgacgttacgactcacctgttgaggcgttccgccaggtgcgatggcagctccagcagcggcgggttgaccataagcctggtaccccgggtacgcaccgtactgcgcataagcgttgggctgcataccgtacatctgtgcgtcgcgtcggaacgtcctgtcagtgaagacgaactgccaagaatctcgtcgtctttagagtcgagactgaccatcgctgggtacccgcccatcatccccatccccggttgttgaaggggtactaccccctgagcgggcccgacggctccgacgcctgccgccccgcccgacgaggcacctccgccctccctatccttgccccaagaacacttgatcggacgtccgtgtacgggatagttttgcaggttgacgatcgcctgagcggcatgttcgtgcgtgtccagcttgacaaacgcgaaccctcgatcggcttgcatcctgatctcgacaatgtagccgtacccctggaacaaggggatcaagtcggcctgggtcgagtaagggatgaggttgccgacgtagacggtggtattgtacaccggggtctgggcggcgacggtttcgaaatccagtggacctccagaaaagttggacggggcgggtgcgcccgagaacccggctgcaccgcccatcatgcctcctccgacccgagatccaccggtctgggtcttttggttggcccaattgacccgaatcgcacgggatccgagccattcgccgttcatggtcgagatggcctgttcagcgtccgatttgtccctgacgaacagcgcgagaaggttgaatcgtcagcctcgacgtgtcctccccccttatcaagctcgacctcgacctcgaggtgatggtgggggcggggacgactcacctgaatgccaagaacccgtaccctctgctctttcccgaattcatatcccacatgaccctcgcctcgctcatggtcgggaacgctccaaacgcctttgtcaaagcctcgtcgttgacttccggactgagatcgccgacaaagacgtggaaatggttgtgcgtgtcttccttgacgcctccacctccacctcctgctgctccggaatgagaagaaggtccggggatgatcgattggggttggaattgcaactgaggacccgccgatgctccgacgcccatcatcatcggcgcagcagcgaacccagcaccagcaccaaccccaacccccctcctcctcccctttctcgtcgtttgctgactttacgatgagcgctccaacgacgacgatgatgaacaaggttgtgaaaaaagccgtcgtcaccgtgacgagcatcgccggtccgacagggtccgcagcttcttccaacaggtgagtcctctaccggacgtgaagaggtcggggtatactaccatgccgcggtttcgtcgagaggatcaaagtggaaactgtcgagcttggaaggctgattcaaagcgtttgtcgttcctgtttcgtccctgcgccgggcttgatagttccgattcagccaagatccctatcggtaagcgcttctgacgctccctcgggatgacgcaacctgctcttgaacgctgacgatgcgtcggtgcgatcctcgcgctacacttttcacttttccctttacaaaggcccgatcgtcggtgggatcgtagcaggagtagcggccgtcctgatcgtaggagggatctggttctggtgtcaccgcaaggccgaaaaagagaaagaggttggtatcgtcgtcgtcgccatcatgactatagcgtgcgtaatgaaaacgaaaaggctgactcgacttgatggtctaacttgataggaggctcgacagcgctcgatcgctcgagctgccagaaagaacgggaccgcccgaccgacgttgatcaagaacaagtcggccgtctcggtcgcttcgtctggcgaaaaggatgccggcggattccctccaccttcaagtcgatccaaggccccgcctgtaccggtcattccttcgcaatacctcgtcagtaaacacggagggcagaacgccccgcacccgcagatgtacgaacaagaggccggatacggtcggtacgccgccgatcagggaggtcgtcagcagtactccgaacgggagcaagagtatgatccgtcttcgcccgtcgccaccgagatgaacacgcacgggacctcgccgacctcgtctacgggttcgcacgggtccgtcactcagcctaaaccaaccgtacccccacctacgagcggttccgcctcgagtgggggcggtagcagtgatcgtcgttctcgagctcaacagcggatcgaggcggccaacgcggccaaggaacgcgaggccgcactcgccgctgccaatccgagcgggaggtacgcgcccgcgcgacccagtccgcttcgagccgaagaacgcaaagacgacgatgacgaggccgtccccaaatgggggtcaaagccgttcaggagcgccaaccctgccaatggcgagaataattcgacagccccgatcaccttggcgcctcccctcgacgtggcgtctggccgggagaaagctgtcagtggggaatggggtgtcgcctattcggacgtggacgatggggccggggcgtttgagcacgatgattacgatgcccggtcggatgggaggaagtcaatgggactggataactcgggtaggcaggctacggggtacgcgtatgacccctcggcgcggagtcggacggtttcaggaggcgctccggacgtctacgctcagcagcagcagcatcagtaccaataccagcaacaacaataccaaacacaagacccttatgcgcagtcccggtacatgtacgagaatgacgaggacccttacgcgccaagcccggcgaggcaggacggtggacgaggcggttattaggccgactctcctcgcgccctggtctggtcttgtaggattatcccctcgactttttcctcttcgctaatcgctttcttcgacttcgggaggccacacctacttatgtactgatgtactgttcttctgtcctccttctgtttcggctgctttcgggaacgagaatacgagtttactgctctcttttgtacgggttctttaccaatgctttgcgatttcatcaatgccgaaaatcgggtcgatgtctggcgaggcaaggtccatcgaggctcgtcgctcctcccggccggctcgggtcgacggtgtcggggtgcatacgaagggtcctagtcgagggtgcaagacggcttcctgaccgtgcgcccccccccccccgaacatcaggtccttccggatcacgtcacgcctctgcacatcgatgaggacaaacctcacagcatctgtatgactcacactcgcataagctagaagaactgttctgctcgtatcgctctgcgttgttgtcgctgacccgaataggacatcagagtcgaggtcacggctgagggagagtgctctttagcaaggctcatcgtgtcgggatttacgtccgaatgcaaggatttggctctggtaatgtaagcgcaagctgctatcagacattttttgaagaaagatgccgcatgcctggactgccgcaagcaacaggatgcccgcagcaagagcgagactgcccatgatcccaataaccgcaacggatcgttactcggggccgagctcttgacaataataccgggaaatcattcattcattcagaattcgcctacgggcttgactcagtccgtaaaacgaggtcggagcgctcgcggaaatcaaatcacaggtcatacatccacatggatgttgacgggttggaagtcgggcggtccctcgagtgatgcttctttatacaactgcggacgatggaggggactgtgacctcgcaaatgctgatatcgggcgatgtgagacttcgttatgattctggcttgaatttgccgccacggaatgtgtaatagtggggtctgcagcgcggagaggacttagtccaatacgggttcagggcaatcaaacaacgatcgactcacgctgattccactagccagtcctgttcgataacggtcaggtcacgaatgaagctcttggtagtctctattacttcgtggtagatgacccaattcgtggaaggtgttcgggtgaagagaacggatgatgggtggacgtgaaggagctgagtggatagaacggtatatgagcaactatttgacgtaacggacagccatatgacttgccgcattctcgcggacgcttctgtacgttccatcgggtagcatacgcgctgcattctataacactttgaattattagcaaaggtagatctgtggtgtcatcctgtcgcgtcataccttgaaataccctgtcaccaagcatttgcgtagccgcttggcgtccccctcgcagctctcgactgggatgttgaatcgctctaagtatttgcccaattgcttgcggattgaaacggctcgcaaaagagctttgtagttgagcttatgcgaagcacaccatttcggcgactgtcgtccatatcgaacaaaggcgttgtaagctgtcaatgggcaaggaaaatgttaactcatgagaatggcgaagtctgttgcgtctgaacttgccattgagcagcgtcagatggtcctgatagatgccaaatcgattagcccgaggttgatctaaggcgtcgcgaggtgaccagactgaccccttcttccgctgtgaatttccgtcgctcgatttcccccatagcgccagctgcaccttctccaaatacgaagacattctggaccgaggtcatggcagcgatagtcaggatctcctctccgcacttgaagtgttgcgaattaagtagctatgcaacgcgagctgcggtattagcaaatcggattgacacggccagaatcgatcgcgctgactgacaatggccgccatcatcggatcgactgggacttcagccatgctggtaccaagaggcttggtcaacctgcctgaatcgtcaatcgctttgagcgaatacaggaactccattgctcggatcatcatctcgcttggtggactgtccatccagtcgaaccgaaggacattgtcgaccccgagcgccttgagctgcagaatgaatagcgagatgtccgatcggacaagttctggtggggttgtcggaggcatcaatccagaggtgatagccgagtaaggaaacagtcggtaagatttgcccggctgcgtacgacccgctcgaccagagcgctggttggccgacgcgaccgagcaaggtgttacagtcaatacgtccatacccgtccgggggttgtacgtcttgatctatagacgatttgcgtgtcaatcagcaaatccttccgtgcgttgtgaacggcgctgatgcattcctcaccttgacgtgcccacagtctaccacatatacgatcccttctatcgtcacacttgcttcggcgatattggtcgccacaatgacctttctcgtgtcccgaccggcgggctcgaaaacaacttgttgatcttctgttggcagtcctgcatgtaacggtaatggcaagatttttggcgccatcttgggcaatctgataacgaatcaagtttaacgatcgaacctggtgctggcctgtcaacgtgtgatgcgctcacgtcaacgaccgatcggcaatctcttgacagcattcttcaatctcttctcgccccgtcagaaagaccagtatatctcccttgggctccttcatgtggatatcgaataccgtttgaatcgcagactcgacgtaattaggactgggcgactccagatatgcggtctgaacggggaatgtccggccttcgagcgagaggactaggacaatcatagatatggtcaggaatcggatcagaggaaacaacatcgaactcggtaaatatactcactgactgcatcatcctgtgaccgatcgtcaccatcggcgttcgagttgaagtactccagaaagtcctccctaagagacacgccgttgggagcttgagtatgagatgtaggctagtgaggaagaccggtggataacttacgcgtcgatagttgcagaagaaatgatgatccttagttctggtcttttccgtcggattcttagcaagacgaatccgtcacgtcagtctcgatctttgaccaagaagctatctcaaggaggctggactgacttttttagcaaccctaagaggaggtccgtgtatgcacttcgctcatgcgcctcatcgatctgtcggtcccgaaatcgatgcacagggataagatcagcacggaccgatgaattcattcgagacctttactcgccatgatcacgctgtaccgactcagcagggggtccaccatcgtctcccggaacaacataccatcggtcagatacttgattcttgtccgcgtcggtgatgagaggtcttcaaaccggatcgagtaccccacctgctcatagattaccacattaaaagataagcaggaaggtcggccttgagcgtaagaagcgagatctagggctgactgacttcgtcaccgaggacactcccgacttcctccgctactcgggctgcaacagtggtggcagctactcttcgaggttgagtgcacgctataacgtggttttctgaagcccaatttgcttctttcaggtattgaggaagctctatgttccgggcgtatagacagttgagtacggtcgacggtgaaactgtcagtctgattcgagctgacttacgggtactcttcccgcaacctgtttggccaacgacaataacgcatccatacttttccacgcaataaagtagcttctcccgatgtttgtaaatcggtaagcgagttcgctgggaagccaaagagagggaagcgttcaggttgttgttgatgggtccagacaggagcgatccttcagattcggcttcacggtctagagtcgatcccggcccagccgtcccgggcttccagaactgtaatggaggcatctcgaactatcttgaatggacgcaggaacgtagcttgtgtctactggcgggtaacgaattacctgcaacattcacgatcacctcggtcttcttgagtcaagtagatgttcgtcgttcgtcatcgcgcttgagactcgcgcttctttgaaatatggaccaatctcgagcgatgtatgtttctgaaacacctcgaacctgcaagtctgatgcaagtatcaatggcggatgtaggtgaagcaccgaatgagctgtgcaacgaaggctgtcatgggaaaggctgatgatacaaacccccccaacggaattcggagtggcaggctgtgaagcatcattataatcaactagggaacctgttctgtgacactactattacaaccggtaaagatacaacgagagacttggcttggtagagatggattcgagaggagaatcaaacgactcagaactgttcgagattggtacagcagacggagaatgccaggaggtgacccgaggcgttggctccgccgatgtctcccttgatctcctcattcaaagcgccgacgctgtgcaaaagaccgattccctgtcagtgtgattcgcaaatccaagtcgatcatgatctatgactcactcaaccgatccgtaaactttggtgacggcaactctcgctcgagaaacggactctggccaggagaccagcatatcctcgtcgaccgaaaaggcaacctgaatcttcgatttccaccttgaaaggagaatcgttgaacgggactcgaaggtcttctctttttcggagtaagagtaagttgtagggtactgtagaccgatcgctcggaattcgccccttagacgttgtacggctgtccatagacgtgcgacgagttgcacaagctgtgaagggctctggcgtcagcattctactccattgtgattgcgagtagcagtacctactccttggaaggacgaagaggctttcgcattctccaccacaggcttcatcaggtcgaaaagaccttgagtcgccgacatgtcctgccccttcttggccttgaggaccagttgacacgaagcggcggaaggttgagaatcggagcacgaagcggtgagctggatctcctcatcatagacgagttcgataccagtgctggtaagcttttccaagcgccatgagttgaagctctgaagcgacttgaattcctctacacaattcgctcgtggtaagtaagccttctcacgcgctacagcgagagaagattgccactcacgttcaagaccaaaggcttcgctcttggtgaaacctttgcgctgctcgcattcgcgccttgcagcggcaagtgcgaggctgatctcgtgcttctggctttggtgttcttcgagacggctcttaagctgtccaagcttttcggactgttcgttgtactcggaggcaaaggaagcgatttgagcgctaccacgagagaagatccggtcaacttcatgctcgcgctttgtcaatcttgggcctcatatagtcaactcacccttgttcagcgattgctgtcttcagctctttgagatccgcttgatcgcattcggtgaccgcatcgatggacatcttttccagtgccaaggccttttcaagggccatgcgtcgatcccttaggtgaggaagcgaatccgtggcatctcggcggatggcatcaatacgctccttgtcctgccgagtttgaggagggatttattagcgattcgtagatagtgcatctgccgagagatggatccacccacctctttcaggctagcgttcatggcttggatttgttgctgaacaccgatcgtcaactgtagtcgccaatcgtaccacttttccttggcaatcagtcgggcgttggtcttcaaggatttgaacatttcctaacaacattaaaccaccttccatcagctcgagttgcgagacatgcgaaaagacggagaaaaaaggcatacctcgaacaagcttttctcctcctcgtcgccgtccaggtagtcccgaacaatgatcgggttgtcaacggaagcgtcgcggaacaactcgtccaagttttcttgcgtgttctcgatgtcctgttgcatttgctgacaagcccagtggtacatcttgtagtaaaaccaggcgttcatggcggcagcgtattcgtgaagagggtaatcgccaacttctccttgcatcatcctttccatgaactcggcaggcataccaccgttcaaaacgctctttctcctcgtcgcggtcggcatcgaagtcatgaactgaatcccgaccatctccaaaaagttgccgagcgaaatttgagaatgagtttgttgggcccattcaggctgttccatcgtctcggcctgggctagtcgcgagggggtcatgggtcgattgactttggagggcgaagccatcatggctcgtgccggggaccgaggggcgagatgcttgtgagggctcctctcgggtgcaccgaaagcgctcaaacgcttgcttggggtcctaggtcgctcgggtgtccgggcactgagcttgacaggcgacgtagaggacggtgcgcttcgagcgggcgcgctgttctccttgtcagcggccgactccatacgtctcgatttggcgacatctccctgttgcaactcggcttcgaacgaacgcttggccggcgagacttttcgaggagtaggaacagacttggtcggggtgaagacgagcttctttgcgacctctttcgcggcctcgacgtttctgccaacgggatcgttttcattggcggcgccagccatcctgggagggctgggtgaaggcccgtaccgatctcgcctggcagacaaggtcgaagcgtccggtacggctgggctggctgcacgatgagagctgggtccggcggatggcgaaggggcacgttgagagacgccgggcgaggtgacgttgagcgaaaagatgttggaaggcgccaccgaagcgttctcatcctgctggttgaggattccaccgtgggcgatcgtaaagtccatcgcttcatcgtcggctgcgtccgaagcgccaaacacgctgaaccctgtcacgtcgtcgtttcgcatgaaagacaaggtcggttcacgaggcggcaactcgtcatcgtccacgctactgatagtctggtcctcacgggtgagaatcgcaccaacagcgatggtctcgtccatctcgacgctctcgtctccattggacatgacggggagtgtgaacaccctcccatcctccgaagcggtcgacaaacttccaaaggggttgttcgagcccgaattgactcggagtggggaagagctcgaactaaagatgcttcccatcgtatgaccggcagaggggtcgtacccatccggcagctcggtcgtgtatccgatactgaccgcgctcctccaggcgttgacgggtggcagaccagggattatgccgcccacggcgaccgtaaagtccatcgtcctctcttccggtccattcttgacgccgttctgggcctcctcctcgtcctcgtcatcctcatcttccgagtcttcctcctcgtcatcggatcgggccgagaccgtactggcaggagaacccgtcggcctcaaggtacccgcaccggagataatctcggtaatatccatatcaacggtcacgtcgtccccgatgctcaacctccctcgcatcctcttggccggagaagcaggcacgacattggaactaaagatggaagacccctgtgtctcgtcgtcgtgcgtttcttgttgccgagcctgaccatcgagagcgagctccgaggtgaaggccgaataagctccctgtcggggtccttgtgcgagatctcgcctgacgctgaatctaggcaaatccagcgcagcgggtgcggcggacgtcgtcgaaaagatggaccccgtagtgggctcatcaaacccgatcgccgaggtcgaagtgaaatccatcgtctggccttcaatgtccatgtcttcttcttcttcttcttcttcctcatcatcttcttcttcttcctcatcgtcttcttctcgatctcccgcgtcattctcgttgaaaccttccttttccgcctcgttgccgctctcggaatccgtctcgatatccatcgacatggcgctctcatcccccacctccatcacggacctccgtttcgaggttgcccttccactaggtcgttcagactggccctgtggttgcgcagatgacgacgctgacgcctcttcaaaggggatggatttcggttggacgagcggtggcaattccccgatggaggtgatcgaattctgtcgtccgtgcctcctgctcgacccgcgtttactctgcgtgggttcttccccatcttgagatccaccgagtttcccgaaatcgaaccccttcttccctgtttcccctccttgagcctggctgttggccgaagcagcggctgcagcgctgaggcccatggtagcgttattgacgggcgtggcggagaccaccgtgtcaaacatcctgacgtgggcgtgaggggcaaacgagacgcttttcctgctcgctaaaaaggcacgtcgggcggcttttgccttttccttgtccgtcatcccggccgtagaggacgagctagggtggttggacgtcgaggtcgtcccggcgaaactcatccgtgagcggggttgaagcgtggcaggcagagtcaggtcgttactgcgcgaaggaatgtcctcgaaatcgtcatcatcgtcatcgtcgtcatttgcttgttgactgttcctgctgttattgttgctgctcaacaacatgttgggtcgagtgccggagaaatcgatcgtatgagcgtatcgatccacgccacctgccagtggcgaagaagtcatggtcgtcgacgtcggtccagcaagacgttttgaaggcgtggtctgtatggcagcattagatcgagggagattccgtcgttgagagttagagggcgagttgggtgatcgacggggagaatgagccgaggtggtcttgaggatggacttgcggggtttctacatcgagcaaccgacatttcgatcgtttcgaaaacattcagcatgatgaatcttctggtctcgatctcgattgaaaagaactcacggcggccctcctaaaactcctcgggctgagcgacttgagagcgggatccgtcacgccagcgatgatcgcgtttcctccgatactcatggccctccgtttgagagcgtctttgctcttgttcatggcctttccagcaagacctctagcggtcacgtcgtcgaattccgagcggatcaatgagggttgaacaacgatgtgcgtgttgttggggtcattcaacgccgagagcgatttcctagctcgaggcaacgaggccggtacgtccaaggtcgccatggtcagtgttgtggccaccgcgagtggtcgagaagagcggtgtcgatgaaggtcagagtctagagtaaaagagttgtccggtagttggctgtttgatacttgatggcgatgttgatgtcgacagagtagtgggtaggagtgttgtggttgttgttgtggtcgatgtgttatttgtttgttttgatcaaaagagagttgaagcaagttccactcgctcgacagctagtcatcccatcaacgatcggaagcaaatacgagtagaggcgctatgagacacgcgcttgtcgagattacgtgatgatcgcgcttctactggcttgccctttgtttcgaatttacttccggttctaccagaactgacgtcaccgaccgactgacaatcacaacgacccacgacgacgaccaacccatgcaagacagacagacattcaacaagctgaatgaacaatgttaagaagagtcgatcttgatacacaaacaatctcttcaacattcatagtattgcacatcgtacatacttggctataatccaccatgaatccttttagacccaccctcggcctcgcctcgtctctgaagacgctccgttttcctacccggcaattcggtcaactcaaaccgtaccacacgacccagttcgctcgaacccctgccatctcgtggtctcgaagactcaccgccgtcggtctaggaagcgccgctgggttgagcttgttcgctctcagtcccggatcgaacaagttctcccccgttcgaatcgccgagtgcgaatgtgagtctcccccaagctggaacggaagaacgctatatcaaagctccttgtcgtctcgttttgcccggtcatcatcgtcctgaccttgcattctcactgacttgcctagcctaccccatccgagccaacccttcgaccgacgacctccccacccaatccatcctatcgccctaccaactctcgttcggagccatctgcggtgtatgtgccgggatctttgtgaaaaagggagcgaaattcgtggcctttactttcggtgccgtctatgtcctcatgcaggtaattccagtgcccgatgcctcaccagctcgcaacccgctctgtcgctgtcactatactgatcagagaccgtcgatcgtccgtctacactcttctacctttttccggcgtctcacagtacttctcttcccgctcgatcatcaacatcaactggaacaagctcggttcccgttacgacgccctctttggtagcaagacggccgagggcaaggtcgccgcgcctaccgtcgaaggcgtaggtcgatggatcgtcgatttcatgaccgccaacttccaacgtgagtcatactacccgcccctgctcccttcctcgctagctagctagctagctagctctccagatttgtttgattggggaagagtaccgaggctgacgatcggttgttgacctcgatagaacgagcgagctttgtcgctgggttcgccctcggaatcaggctcggttaaacagatcgaaccgtatcgatcctgaatcgagcggccgccccgtcgcgtgtatcagtagtattatatcagtagtagccaagtcttggtaacaggatcgaccatcatgtgtatgagattcaggggatatcaagcgttgcacggattttgcgggttcgaggcggattgggctacaggtcgttcgacacggtccgcctttgatattgggagtgtttcccgatgagagcccgacattggaaacgagaacgaagggacaaagagcgctagaactttgcacaggatgtcatgcagtcaagcgttcttttaaggtttgcgagaactacggccaggacaacgatgtctttcgtgggcgtttaaatttcctgcttcgggagccgtcaagttgtcactggtgttagccttctaagggccaaagatcttttcgtccggaacacaatcctccaaaccctgcgatgttcgaggggtggaaacagacccaggtgaattcttgttcggcctgccatacggatgccaatgaggaacctgtcgctaagggtcgatcagctatcctattgcttgggcagcagatggcagctattgttacggaatctcagtgtcttgccgtgtgagatgtaaaggacgtctccattaggattggaatagttcatccgaatattccagcaaaggggccaatcctcactgtgacgttttttgtgagcaaatacatcttcgcagtggctacgcatgttgagcgacccgcctcatcgatggtttcacctaaccaaagctcaaccacttgacccggaccgtgcatttgcccagaggttggggacatctggtctgtttattgccgtcatcttacaacctctcaggatagcctgacgtcgactgtatgtcgcactcccaaatggtcttatcgaacagcatcttagcgggctgccggcgggagcgcctggaaaggctggaccgagatgacagcgttggggccaagaatttggacgagtgatactcgctgagcctctgtagccctcaccatgttcctttccgcttcagcagggtgctatccggctgacctgtaaagatacgccaggacgatgtgtccctgtgcgtggtggaaggccttgagtggatatgggtctacagacatgaaatgccttaggtcaaggcttctcagatcaaggcctgaacccacaaacctcccaagacatggaacacgatctgatggcacatcgccggccaattaccagccaaatgatcttgacgcccataacaaacaccgttcgcgattttgtgccccgggcatcttgatccgaacatgaacgtacagcattatatacggtgctcgagccacgtaaacatcggcgatcgacaaggttatggttcggcttccggtgacaaagcctcttcgggtgccccaccagctccagcactgcgcgaggtgatagtaacgggtcagctcttcgacctcgtccgatggacatgatctgccgcgggggcttacccggcggcgcctctgttctttgcccgcttggcctttctctcttccttcttgtcctgtggctttttccctccagctccgacaccgcggacgaccacctgaccgaaagctccgagttgggtcattgtcgggtcccactcttggtcggccaacgcgtttgccgtcggatcgacgtccattttggaatccgaatcggcgtgcaatccgagaccctgatccgcttctgcattctcgctcgcggcctgagcttgcgctcgtgcctgggcgaccttttccaggtagaacgggcgcaagattccgatctgaaaggggatatcctgcggtgtaagtggaaggaaaggaggcggcccaggatattccaacggaggtgcctcgggtctgtttaagcgggaacaagcaagggacacgtaagtctgaccgtctgaacgtcgcaaaagcttcagcgaaatcgctcactctttcggttccgacttggctttcgatttgcgatcccgcaagagtttcttgggaatcgcgcccatccctcccaaacccaaaaagtcgtccatgtcgcccatgcccggcatcccaccactgcgagaaacgagaagcgatcacgatatcaatcgctgatcggacagtgcgaatccgcggccggacccacaacaacatgacatcttccccaatctcgtcgtcatcttcatcgggctcgacctagagagcagtcccgtatcagccgaccggggaagggtttcaacgctaggtgagaccgacacgctcacctgctcatccaaagcctgtcgaagcttcttgtgcatatcatccagcttggcaccatatcgaaagacgtcatcctgtacgtagtcatccaattcgctagtcgtgacgttgccgttattccccaagaccttttcgatcaggctctgtttcgatacgtgtacccgagcgagattcaaacgcgtcagcccgaggtctcctgcgagaccgtccgcacgcgccactctagactgaccgatgcagataccggatcggtctggctgactcgatcggtgagtaacgtggccgtcttgccgaggcccatcagataatccgaggcgatctggctgacgaaatcgagagccatcgagttgcagcctgcgcgcatggtcaatcgccaacgagtcagccaacgctcgagtgtatcatcatcgtgatccccacgagctcaccctcgaaccctgcgtgactcaacatgaccccggttgccaacctcaattgacttgccgccacgccctcgttgatgaccctactcgacctcgtcctcgcccgcttgaactctctgacgcggatcgagtgatcacgcagatccttgtccgcagcgggatgatcctcgatggatccgttggccaaggcggacaagagcgaagccgtctccctcatactctgcatgagcgtgatgttctggctgatccggtgggacaaggattcgctcgggcgggaagcgcgatcggtcgatggggccgatactggcacggtcgatgacgcgggcgaggtacgtggcaaggccgaaccgattggtgcgagctctgcccaccaggtttcgtcgtcctttcccatatcggtggggacgaccgtctccgaggggaaccaagccggaggttccagctttctccgctttggatcctctggcagggcggccgtcgacgaggaaccgagacgttttcgattcgagagcaaagactggccgtcgcagaggatggctcgcgtcttggcgaccgcattggccgtcggtcgaaatccggtctgttgcgcacggtgatcgggatcagcagtgtgaaccgactacagagacggaggctcggtcactcacgatgacgtctactagggaaagttgagtcagatgacaccatttcgtcagctcgggcgtttgaggggttcgacgaccgacaggcaatactcactccccgtggcctctcctgctccctctgcgttcccgacaacggcaaccgccccagcgacgatcgaccccgaatctcccgcgcccgacgtcttcttccccgtcaatccgtactcggggttgagcgcgttcgccacgtcgttcttgtccggcaagaacctcagatgatgattggccaatcgttgcataaacgtcgcgtgacttcggacgggatggggctaacgagtcgcaagatgcagatttccgtcagtatctacgttgtcatgctcgacgttccgaccgactcgggacgtatcaggagtggttgcaggaggagggggggggggggtcaggcggcccggactcacgtcggcattgtatttcaagcaattctcccagatcaacgtcagatccctagcgaactgcgtcttgttcctgtactccttggccctgatctttttctgcatcgtgccgatatccatgggttccgagatgactatcccgaccgaaatcgaggcatgtcagctcggatgtgcgtttggttcgatacggcgcggggcggcgcggcatagtggatggatacgggacaaggacgaggacgaggacgagaaagatcagagggagggagaggaacgcacctttatcgtaatccggtgcaatcttctttgtaacgggtttcatgaacggttccgcttcgatcggctgcgagtccctccgtcattgcgcgtgtgtgtgtgtgccgagaccgagatcgagaccgtgatggcgatagtcgatatatgatcccggaagaggtacaccgagaggtccgaaggagagtttcaagacgaggtggaatgtgcgtcatgaatccatcgatagttccgatgatgaatgaatgccggtccgaaaagatatcgcgtcgccccaagacggatgttgtatgtaagtaaacgatgatgaggaattagccttccttctcccctcttctcctcttccgaatgcagcttcctttgacgatcggttatgacccccgcctcgggtattagccagggacgatggtcataatgacgaggatgatgacgaggatgatgatggtactaacgtatgccttggtgatatcgctcaacatccgctcgcaaccgctcaggaactcgtcgtgagccttttgaggcggtactttttcctatcaaagggtccgcccccgagtccgagttcgagtccgagtccagatggtggagcgatgaaggatcgaacatgattgaatgggatgggatggggatcgcattgaatcggtacgtcagtcgatggattctctttcaggggagacacaaacgcgcgatatgccgcagctcgtctcaccctgcctatcgagatgacatcgttgagcaactttccaaactcttcttcgctgatctttatggcttccgggcgtgattgtatggcagggaggaggtactaaattgattgtgagaacggggaggggtcgcgaggtcagctcggtcagggtgctcaagtcccaaggattgacgagaggaagctcaccttgagcgacatgatggggataaatgcgaatgatatgagcacccggtgtaacgttgatgccaataccgggtgtctatgatcgatcttgactggtgagcttgttgataataatgacgatgcaaggtaggtagatgatggttgcactcgacctgatccctgatccctgatcccccccggccccggccccccgcttgcccggacatctactaaaatgattagatgtccgtgtttctccaaacgtaaaaggtaacgtcatcgtcatcgtccaagcggtcgatgtccgttatcggatgcaggatgtccgttgttgtcctcggaatcaaattcacacctaaaaacatgacaatgtccgcgtgtttctctctcggttccagcgagtttgaacgatcacaatctacctccgagcacaccgacaacctacacaactatacactgcacttgtacttgtacttgttgaagtgacaaccattcagttgcagttgctcatgccatcgtcgtagtttctctcaccatactcacgacgaatcaacgaccatgagtgaaccactcgcacctcccctatcaacgaccaacaacaacaccctctctgtcgactctcacgtcgaccgtcgaccgaccaacgagtacccacagaccccagacgtgctcgataataaccctctccatcgacaagggggtatcaggtccgattatgtcaactcgcttcaccgtgggaaccctccggaacatatccagcaacagcaacaacagcaacagggcgaccagaccggaccatcctcctcgcaccccctctcgtcgcccaacctcggaggcagcgcgtttcaccacgatcatcaggggtccatccctggacctaaacgggtgacgagggctttcggattgagagtcatcaggaccgttaggaggggtcaattgcctttcctcctggtcttctttacgtgagtcgagggtgtctgccccctgacccacggacccggaccaaggcggctcgtcgtcctcgtcctcgtcccggccgggctgcaggggaaagatggtggtcgaaagtcgagtttagctgaatactgactactcctcgctcgcacttccaacctcttcatctgatcgacgacatgtcacaacccggccgaccgaccccacacacacatacacacgtatagctgcgtcgtcatcttcttctccgccctctccggcctaggttacgaagaacccaactcgacgccttcctcgcaagtcgacgaaaaggaattcgacgtcggccgacccgtgtttgatggaaaggggatgggagcggaacaagaggagaaagtcgagaggatgaaaaggttggaacaacagtgggctaaacaaaagaggcccaaggatgtgagtgtgtgagcgagaagagggcggcaggtggggctcgggatgagatccaaggcgagaggggagattggggataggtggataggtggatgtttgatcgtgatgctgatggacgaaatcggaacgattttctctctcgcgcgcgctcttctccgtggacctctttctgtcttccttcctgaccaccaaccccgacccggacccgcgccctgacccgaactcggactcgatctcgaactcgtagggcgcctggatgaaatcacaacgcaaccaacgagaaatccgtcgaaagccgctcgcagactcgaggttccaacgacagcgtcaacaagaggaacccgacctcgagcaccaacagcaacaacaggaaaaggaacggttggacgcggtcgagcatggcgaggaacatgagaggatgcacgaggccgagcgggatggagaggatgggttgggggagggggatgagggggtcggttacgaggacgaggagttggagtgagcgccgatgccattgccagcgcgatcagcaggccggggggcggccgtgcacgtctcgacccaagagcgtggtcgtctgagtctcgcacagggccttcgatctggctcatctcgcaatgactccaagccacacccaacctctaggatgagggtcgatttcggggtcagctcaggatgtacaacagaggtcctcgtcgtggttacttgtttatagagagacagagagaacgagagacgccagacgccagcgtcgtcttgttctcgtcgcgagtgtatcgtatggttttgtttttgtcagggcttatatagagatgtcgtcttgttgagtttcattgcgggttcatgtcgaggaggcgaccgtcgggctttgcattcaagacattcacacgtcgaacggatccatgggcgaagcatagccaggagactgtcgtactgatacgagacaaaaggcactggtactcgacttgaaacattctatgaccgtgtacttattaacgaaaaagggatgggctcgttgcgaccgagatatcactgataaagatccaaggtcgactcccggggtcgggtccggaataagtcaaacgtctccagccgatctgccagagccggggtgctcatgatgaacaataatatatgcgttcgatacaagaaggactgaaacaaggtctcctttgatgaagcgctcgatcggcaagacgatgcggctcaaccttttgcttgcgggaatgtcgagccaagtcagcgcaggcttccgattgagcacatggtgacgacctacatttcttcgtatgatcgtatgtaaagtccaagtacagtcagtaacaatgttccggcaagccgcaccacacgtcacaatgcccacggcgattccagatgcgcctgtcatgacaggcgttgtcgttagtctcaaagggtcttgataattgacaatagctaatgacacaaaggcaaagagatttcgatcgttgtagacaacgaccgactaacctgtcacagcatctcgacccccttgcaagaaaggtgacttgcacgtggtaagatatgctgttgtaccgttgaaggtttcttcagtatcaaatggaatcacagcaccagatcatcctatacgcaagcttgcaagaacaactatgcagtgacatcatatcccatgcagtcggcttatcccctgtaaaggaacatgaagtaccattttttgttcttggtaggcaatagcccgcagtttccatatccccgatgataccttttaacatcccgagtagtaccgatgttgggatattggacgatattcggttatcgtatcccaaatgataccgatattgggatgttcgacaagattgtccccgatagtgatccccaaacgcgcgccgcgtgcaatcgaccctagaagatccgctcgtaccgatggctatcgcctgcagtgtactagcatttgctacagagggatgatgagcccctatttggtcaatcttgatcgctcaggtgcttctgggatcggtaaggcccttggtgggacatactgatgggcaaataagttccaggtttcgcgtggaaacaaatttgatgttggaaggtcttagtagagtacgccgtatccaatatatgtgacgttccagacaactttcaccaatcaagtttatgccaaaatgagcttttcaagttgtatttcgtcgaaattgatcagtcaagtgaccgcccggtcctgatcgatgtgtttaaactgtcgctcatatctaggtctataagtcacgaaacaaacgagtactctatgtaactaacgactatatactattaatgtaacgaacaagctgagacacgatctatcattcgtggtcgaccaatagaaaccttcgcagatctcgtagcacaccatcgctgacattcagttgattagaagtctgactgcagattatccgtatgccaaccgtcgagcgcgagatttgaggatcgataattcagcagtgcagtttgtgagctgctcatccgggacaaagctgctctcgctccaccgtctctctcgaaggaccgtgtgaacggctcgaccattggcatgtagattttgaacatgtatcagccacactgtttagaaacccgcatggtctttctcgttacctattgtttatggcgcattcttgaccatccttaagcgccaggatcgcatttgtatgctgcgagagctggattggcgcgtttcataaagataacatggcctgagcatacaagttcattcaagcggaaggctaatgacctggcgacctcgggacttgagccaccctgcagaatggcgaaccggtcttggacagttcgcctccatgacatttgtggagacgaggaaaagagagctgattgcggagtcgtgggcgttgcctcctccggcagcgcacaatcttgtctataggcaaacagcaatgatcagcgttcctcgaccagctcaaccttgagcaaaagtacagtcaagtttgccaagccgatagcgtcagacagggagtttctgtcgaccttgattccgatcaccgcctcttcatctctcaaatcggttgccgctacaaggctttgtttctcgaaagggttagggaagggagtacatgaagatccctacaccggtgacggctctcaggaaccttcggttgaatgatgtgacaaaggtcgtacgtgccgcagcctgggttcagctacaactcgaggatcccacggtacaagatcgcaagctgcggcaagagatgcagtgggatgcaaagaaacaaacgtacaaggtccagtggctcttcagcgacgccgatgctcgcggtattcttgtccttcgtcccaagaacatccatcctgatttacaaggtgccagattttccagatgacccaggcccattctattgcgatgtgacggggaattcgccgacggaagatcctatccaccagagcctggtgggctttgatttcggcgcccgccccgacgtcttcggtttaatggcgaaccgtgctcggtcacgactagaggcacatatatatatgcgatttcaccgtctcatgcattaaagaccaagaaaccatcggcgagtctcgatactagggctacaagcggaaagacgatcgggagagtacagtggcgtgtataacatgttctctggatcaggtatcggatgcaaggtgcgcggggctgcgtggtaccggcgtcgaatgttgatccggacggctggaacgttgaaggccgactccctcgtcatgccttgtccgcgttggccgtctgcgaaggtggcgaagtggcgggtcctcgcgcgtggccttcggccacctcgggagcgctcgagctgacgggcgctccggtcgttcttcggttggctctggcgtcgagcgccctggcgacccaggcagccatatccacctcgcgttcgtcatcctccttcatccagggatgttccagcaactgagcataggtcgggcgggcgtcgggttgtttcaaaaggctgcgtgggtaggcagtgcggttagaagagcgcttcgtggtcgcttctggatggctctgcggtgactcaccagctagcaacaaagtcctgagccgtggcggaatagtgatccggcagcttgggaggcggcccgtgcacgatggcttgcaactgagcaaacacgttctggtacgtctcgggcgggtaggggtaacatcccatggccaactcgatgatggtcaatccgaccgaccagacgtcggatgagacggtgtacgtgctgacttgacccgtgctttctcccttgatacgctcgggctggtcgagtgagcaggtgacaaggtcagcgggggtgcggtgtccagagatgagacgtgtcactcaccgccatgtaactctgacatccgatgttggtcttggccagactcttttccagctgacccgacacaccaaagtcgcacaacttgatctgaccctttttgttggcgagcaggttggtcggcttgacgtctacaagcgaggtctcggatggttagcctcgtgttgtctgattcgctggtatccacaaccccgcgacaccgactcacctcgatgcatgacctgcaactcgtccttcaaaaacttcaaccccttgatcgcggcctttgtgatcctggcgagttcgttttcaggaatcccgttgatattcaaggcgtcgagactgccggcgtccatgtactcgatacagtaatagacgcaggattcgaccaggaacgccccgtagaattcgataatctcgggagcgatggctcgatgcagaatgtcgagttccatgatgatcccgttcaatttcgattgatccagttcgagtcggatttcctttatggcgccccagcatacttgtcaaccacaacgtctacctgccgtctcgccgacccgagactcaccttcatggccatggtcaccttggtcggcttgtggtagacctttctcacttccccataattgcccttaccgagctcttcctgcaattccatttgatccttgttgatctcaaaggaccgtccgttggaaaagttgaccccctcggcgtgcaagatagcctttttatcgaaattgagtttcccggaagggtccacgatcttggaaaagtttccaaacggcgaattgttgctcccgttcgctccgccgctcggtcctgcacctccacccatgctggccagtgtcatccctgcaggcctgttgagccgtctccctggtccacctccaagtccggtcgaggggagcacaggggcacctccgccgggcctgacgagactgggtgcgccagcccggttcaacccaccgcctgctccgttcaaggtgggtgcaccggaggctgcccgtcgagctgccaaaccacccaacaagggggctcctgatccgcctggtcgcatccctcccgctcctccgctcggtgcagtcgcccgactagcggccgaggcgaggagggaagacgtcgaggtcgaatccgcaccccctggtgccggtgccccggattttgacctggtcgccatggcctatgaatcccgtcgtatgaacgtctcaggcatcagcgagagttcggtgaacctctgcgggtgcggcaggttgtgactcacatcgatcttggcttgaagggtgggtggcaacttgctccccccaccctggctcatcccgctttgcaagcccgtcctccccgcgcccaatcctcgtcccactccaccgcctagacctaccccaggtccaggtcgaggaggaggactcttcatcccgcccagccctccggacgctgctcctgctgaaccggcgatggaaggtggactcttgatgacctgtggggaagaaggggaaccgtgcaccatatccctggcgaggaccgtagccggggaagaagaagaagccgaaggtgctggtggtggtggtgctcttgccgtagaagcgtcgacggcttcagtggcgctgtcggtgctgccattggtggacttggggatcagagtgggttccgcgggtttcggggtgacttcccctgatcctccagctggactgccggggaccgaactgggcctctccgtttcctccttttgtcccccgttggcgctgacggtcttgtctccatctccagagaggctcaacccttgcatctctcttgtcggggaagaactcatcgtcgagagtatgtttgccttgttctgtgtattcgagacaagggatccggtatgacggtcttcttcttgattttcgctccgagttgatcagcgacgacttgtcaagcctgagctagatggctagtaagagtgtttgtcgtgtcttcgcttgtgtatagacgtaaggaaggccctccggatcggattcctggtttgaacgttgaatctagctaggtcccgtcgatcagagattggtcgaatcggacactcgatcaaaagcagtgtatgctctttcctgctatccgctggatcgatgacggatgacgaggagaattccaggctaaaagaggtagactcttggttatgttgaaatgaagtcttgtggggaaagtgggtacggtcacggtcgatcttttcccacccgtgtagagatgggtataacctggagctagccttgctttggctgacgtcgatcgagatttcactggttgggctatccccggtggagaggactatttcgacgttgattgtatatcacgatacgtctgcgagcgagtcgaggataagtgtgtcgatgtatgatgtgcgtgtaaagaggattcgaggagccccttccctctacactcttgccagactctgtctgccccgctcggtcagccaaccactcagtctcagccaagctcaccacccacccacccagcgacctcgccgcaccgcactctcggattcgaggcatatcgtcgtccccccaagtcatcatcacctccatcaaccgtccacccccgttggaacccttttcagttccaggggacacctcttcaagaccaaccttcaactcacatcaagatgcagatctttgtcaagacgtacgttcagctcgatcatgcccgccgagtcgatggatggacggacgatcaatcgagatggggagatgcgacatcgaagatgaaagctgaccttccccccctgccttgccttactttgccttgccctgctttgccttgcgtgtgcctcgacgtatcatccggtgacatcacagcctcacgggcaagaccatcaccctcgaggtggagtcttccgacactatcgacaacgtcaagtcgaaggttcgtaccccgtccggaagcctcgggaacgggggagctagctcgtgtgtggcgtgtccatctgtgtgtgtgtgtgcttgtgtgtgattgcgtatgtgtgtgtggatggacggacgggagatcagaagatgcgacagaggacgacccggtactcaggaatgcaagaatcgacctcccactcggcatggtctctggacgaacggggcgctctgatcaagagaaagagaaagagcgggagagagggatctctgacggatcaccatcctggtcttgctcgacaatcggcttccttggcactttcccgatctcgagatcgttatcgacgggtcacccgatcaaagaccgaagacctttttccgatgaactctcgaccgagactgccgggacaggcaccgcattgtcaaccggcggaccgacactcgagagcatggtggacgattcgagatagacgtcactccgccttgaccatcccataaaaccgaccatacgaccatcctatattccacacgccgattacgggggaggaaagcagtcccggatgtctcgaaaaatcgactccccgctcgacctcctcgggagccgatcgacgggaagactcgatggtcaatcactcttcgggaccgcgcgccgacggcgataccggtccgcccgtctttgccccccaatcgaacatctgagacattccagagggatcaggacggtcatgcttcagggatcctatgacggcctcttcaggatggtagacgctgggacattgaatggttcacgccgacctcgcaccgatcccggctttcttggaacgggttgaaatcagcctgaacgcacacacacacatacacacgcgcaggcacacatgcatgcatacacatcgcacactatgctccctcctgaccaccgctactaccgccgcacaagacttaccgttcctctcctcatcccccgaactcgtacagatccaggacaaggagggaatcccccctgatcagcaacgactcatctttgccggcaagcagctcgaagacggccgaaccctctcggactacaacatccagaaggagtcgaccttgcacttggtcctccgtctgcgtggtggaatcatcgagccttcgttgaaggtcttggccaacaagtacaacgtgagtgtcgagcgtgagagatggggggtccgtttggtcgggttcgaagaagcactgggggcagcgaccgtagtgttcccgctcgtgaaccgcttggaacccggtcttgccctgtcgcgtgatcgatctgtcggagcgatcgctgatcgcaaatcttcatttattccctcccggactctacagtgcgacaagcagatctgccgtgtctgttacgcccgtctccctccccgtgctaccaactgcgtaagtcacgagtacaccgtcgtcaagcacgactctaggctcatctgagccaaccttgaacatccacagaggaagaggaagtgcggacactcgtcccagctccgacccaagaagaagctcaagtagtctactcgccacggaatccactctttcatcgcccgggctcgaaggattttctcttcggatcggacggtgcaaggtgtttcagtgcgctgtgtaggggggtcacgtaggatcattggcgcgtagtaccttggctcggacggacgcagggagggggtacggcttgtcgatgtcttatgatctatttgacatacaaaatccacgactttttctgtttccgcgggatgcgcacagatggcgtcccggttcatcgtccagagaattatggtggtcttgtcgtggatggatgccatgcgatccaaggcctggagggtgattgaaacgtctcgatccggtttgccggcgtttcagaagcgtctcagtggcgactggtcgagcaagcaccgatattcatacgaccaagattcttgaaattcgctccgaagggattgtgacagctataatgcgtgggtttcgacgggactggatagagactgggaatcgaagcggcgaaagactggaaattgtgcgcacgatcgttgcctatttcgactgctgcttgcgcaagtgggctttttccagagttggtaccaggtgtttctttgagctcggataaagtttgcgacgagatttacgatctagggacaggctactggaagcagactcgtgaccatccgaaacattggaagttggcaatcaacaagtctgaacacttgtaatgacagccgcgatctgcgcaatttcgttacactgtttttatatatatcgtaccaatggacgactgacccatgagagatttaccttaatctcaagggcaacatttcccgtctggcgatacgtatctagaccttacatctggagagggtctcgtcttcctaccaacaaaaatcgtttgttaagggctatgtcaggtggtggtgcaattggagagatagctgttcacaagacgttgttttcacaacacgcgaattgatgtagtcatcaaggaaatctacccgcatatacatctggcacggacatcatcaaatagcctcgcggctaagtatcaaagatgaggacctgcacggcaccgtcctcatatatgcccaacgaaacacatctccgctgtcgtgagcatttctccgttggtctcccgcaaatagagtatagcacaaactagtacatacgatacaacctttacgaagctctagtaaatcactgtaagcagccaacaagcctggcaagacagtctgccatcaaggtccagtcggtacgagcgtaggtggaggtgcgatgggcttgactctgagctggggacgaatctgcaagcgaaatatcaagattctgtcagcgctgtcacgggatcgtcgcttgagcctgtcaaactcacaatctcaaccatgacaggcatcaagccaggcagatgatatagcataggtggcacaatgggatcagcggcacccttcttctgttggtgccgttttctcggtctgtgctctttattcgccgaggcaggcggttcgggcggaggcgtcgaatccttgtgacggtgcatgtcgatcgaattacgcaatttgcgtagcctcgactcgtccgataattgtttaggtgtatcatcgccgttctggtcgctaaagtggctggcgatcgagagtcgctttttgtggtgagaagcgctcttctgatccgtctcgtcccagtcttgcacatcgccaccttcgaccagattgcggcccttgtcctcgtcagcttcgggttcttcctccgagctttcatcttcctcttcattttcggcaacgtcacgaaccacagcatcactgatgttgagactggcgacgacgctgtcgataagtgcagtctcctcggctgacgccccttgcccttgaaatcgacgccggactttctcctcgtatgcgaccttgagcttgtagtggtatgaagccacggcatcgacctcgcgtagaatggccatacgttcctctccagcatgcggcaggaggaattccaggtcgaccttttcaccaacaccgtctcgcgcaaagtttaagaacagctcgacccagctcatcagcgagtcgaacaacccttgtcccttggagtgaactttgtgcacaaagccgtagaatgcctgctcgtgtcgctgaactaggtcgataaaggtttgcaccgtcctccctgggtcctcctggctcactgagtgccgatgaaaagggcgatcagcttggctcatttcgagcaggagtagtagactcacgctcttcgacgctctcgactgttcggatcaaatcattgatgaaattctggccatcggacagcgagtcggcgatactggccgccttgtagaccgtcgcaaggggcgagtaaaagatggtgatgatatccttcagcagctcggcggtagtgccctgatcgatggaagattcgtcagcgggcccgacggtttctggacttggcagttggagatatacctcgaatatgagagccagcagctgctccttttctctcttccgtaccatcaacttcatcaacacgttgagatcctcaaagagccaggcatcgtcactgtccggaccttcatcgtcgtccgagtcgtccaaagcatccctgcgctttttgtaggccaaatacgccttgttggctcgcatcacacgctgcatttgactacggtccaaacaaggcggttccggtgatcggagtacaacggccagcagatcgagaccctcttccgctacgcatgtagggtgttaagccaggctgcccatcatagttctttaaacgacggagctgctcacctgcatctctccggtagacggtttgcacttcgaaaggtgcattgacgtacttgtcgatcttttgacagatcgaggggttgtcgatgcgttcagcgaccgcatcgatgtcctcttgtaccgcgcgaacctcttccgacaaggtggaagagaacatgctgcaagggcacctgatgaggtgccgtacctaatgccgcgacgcaattctctccgacttaccgctgaatcaaactctgtccgccgaaaggccgtgccaggaacaagtcgagcactcccctgatcatcgccatcgggttcgagaccttgaggattccccgaagcatgaagtagggcatcatgccatgcacccgtttcaactgggtcaacgtatcagacgcgttgtcagcagcaacgaagatctgaaagatcgtggcggccaggctgtgaaagaatagaccgtcaatcgatcgcctcgcccgagcacgtgagctactgcttacgagatctttccccactccatgacactcttttccgcagggggcaagtccttggcatactcgacgcgccgcacgacatcaaagacgcccttcaacccgccttctttcccgaggatatctcctttaaagtcagccaggccctctcgcagtgcttcgacccgcttctcggcctcttccttgaacctccgtttcccctcttccctgacggcatctgcctcggctcgtctttgcgcatcgagtcgctcggccggtgagagctgaatggcgccggacaacaagaaggaacgcaagaccatcgaattgagagcgaacgggatgccaaggatgacattcaagtacgctctcagcgtcaaccgatttttttccctggcaagtggagaagaactgtacgcgtcaaagctgtcggttcggctcaggtcatcggtcgaatgggtcgatgtaggcgtgcctgatccgctcgaaggtcccgcctgaggcccagacccgtagaaagctctcagagggttgtaggccgagtagtaagaggctgaggatgcaggcgtgggagtcatcgtagtagccgtccggtctttaggcggcaacacaggaaagtgataatcagggaattgccgtcggagctgcgaagtcgaggtagataacagtcttagtccatcgcgaccaactgcacaagttgccaattagaatcacctcttctgccagtcgcttaaagtccccgtatcgcctggcaacgtggacatcgggagcgtgtggtcgttttgtgcggatgatgaattcctgcaaggggtttcgaacacattcgattagttttacatccagcttccaagtacaacatagcgaggtgctcacatcgtgattcttgctcctcactctacccttctccatgacattccgtacacagatcacattgacgtcgaacccaggccccatcttggcctgtctctcgagcatcttctttctcgcctcctcgccggcaatctccaacttgcgcaaatctccctgtccgatcctgaccacctcttctcccgtggtcagtttgatcccggcaccgaagagcatggcgagttgtttctgcatcttttcccacaacttgcgacgagcgtgatattcgatgagttcctcctctgaggccaaggagaggtccggttcgccattcgacacggcggtagggctgagtcgcgtttgattgatcgcgagaaacgaggtgacgaacggctggaccttgcccgaccaaaaggtaggtggtgctgctgcgagaaagggaaaggggagcaagaactgatgaaagaggtacctcaggacgggcagatcgccctgtcctccttcggtcctcgcaatcttcatgaccttgccatcatgactcagtggctggaacggaggtcctaggagcccgagtgccgatgcaccgagtgacggatcgcagagcgagttcaactccctctcaacgacgagaccgacgagggtctttttcaggtaatgtgctcgcagcggtgtcaactcggcagaatccgtctgtgctgccgtattgggtagagacctgacagtcttgtgcagggctgaagttctcgttctattctccttggattcagttggcatgatgacctcgtcttccgaatcttcttccggcgcagcaggtagggctcgagccggagctcccgatccgcttctcaaagggggtggtctatgtttgtccgccatgttcctgtcgacgattcgttcctaatatccgtaggactcgccgatatcgcgatgatgattcggtccaaacactgatcgtcccactgatctggatgttctggacagggggtcgggctgcgtgtttactttcgagctctagactctgaacgtggtccgaccttgaagtggactgcgatccgggtcttcgatcctcgagacctgctgcaacacgatcgggttctttttgatgatttgattgagacggttcagactttgagagtaaactacgacttgcgacttgtcatccagactcatttgatcttggctcgccatcaccatcaccatattacattatgattactacgggcctacggggtaacgaatgacgccggccggggcagggggagctcggaatctgatgtcatcgtcatccccgcttaggttcacagatgtccatagactcgtcgcgcaccctagatcgcagcaccgcccctctcgcagctttcagattcgaccaacgattcagcagtcctggtattccaatggtacatgatgatatcaataagaggccgggtcaaacaatgacagtttacaaattgacaaggcagacgcctcgccaacagctggcggtctggtggagatttacgtgtttctatgtacaaaggcgggagattcgtttatgtactattaaaccgatcatgatggcaggaaatcgatgcacgtgatccaagtgagaaacagagagaataaccccttccacgtgtcccgtggagtgggttcaccgcgattcgtctagatggaagataccatgatgatgaccaatgtgtagttcagcggcgagttcggatcctcccgcctcatgcacgagcagagctacgtgctgtgctgatgatggtaatagtgctgaagatggtaataaggtgaggacgccgtcgccgcgtccatatgcatgggacagttgaagaagagggatcgatggctggatacagggatagattgttcgtgagagtgtcgcgtgcgactcatgtaaaggcgatcttgggagcgacggtcctttcggcctcgagcttggccttgttagccgcatgggcggcgtccctacaagcctgtagcttcacactattgtcacagatgtcgagccccagatcagccatcacgtccggcgggtcgttcggaggaaggtgaatcacgccgcgcactcaccatccatgctgttcaggcaacctatggtttccacagaaactcttgccgcagaatccacaatccccgacgatcctctgagccgccttgttgcaatcgacggtatcccgactggcatctgtggcaggcaaatccttattcgtggtggacgaagcggggaggggaggagacgagacgatgatctgggcttgacacttcttctttccgggcctgggattgacgaaaagcgactgtcagccgggttgaagggcaacagcgagggagatagtcgttacttacatcttggcgatggctaatatgaatagattgagctggtttggttgtttatcgaaaggtgcgagtggacctttgttgatgtagataaggaacaagtagcgtttagtggagctctacttgttctgcttgcgacgtctatagattcgattcgagttcgtgttgcaatgaggagatggtttgtgattgagaattagaaccgaggcctgcaaggatagacgtggtcgattgtgatgatggtcgagttgtgttatatgaacgggaaggatcgattgaaaggggcgacttgcgattgtgactccactcgctctgctctgctcccgccactcttggatcactcatcatcatccatctcttgctcatcaaacccgaacgctttcgcggcctctgagcggaaacccatcaaaggtggaaatagtaggggaagatgccagaggggttccggggtgaacggcgtcagcggcagggccagaggttaggcgcggagggagattgatcgacacccgccgaccgaccacggggattcgcctccctttccattcgccatgtccgctggcttcccgctcatcgggtcgcgtgggttccccgcgagtctcggtctcttgaaatgcttccgaatcacctcagtcggccacccgtttatcgctttcacgatcgaatgttgataacccgcagcgtatccgcaaaacagagatatacgaagcgagacagaccgtccggaacgggttggcgacccacaaaccccaatccgttcctcgtgcgcaatcaagccttttcttattgtgcataacatcctttcaccgtgcacgaagcatatgctaatctctcttacaactcgttcaatcgtcaaattcgtgaacgtcatgcgacgcaaacgtatccatgacgcccttgaccttttcatacacggtgaatacgatcgcttgtccaggggcgactctcatgaccctaggcaagatacccttgtagaacgccttcggaccctcttgcacgaacatgtcggtcgtgacggccttgaaccggctgaacgccgtctcgccctctgtccgcgaagctctttgaattcgcctgcaacgagcgagattcatgctgatcagcttacacacccatagaatggcggacgcggtagctgtggacgtacgtcttgatcgtgtcgatcggggcattcgagaacggtcccattgctcccgagacgagacccaagatcatcgtttgccatgaaggcaaatcgacatcctgatattcgggctgatacttgatggccagccttttgaactcttgataggccgtaaagttgacacctgcaagtcatggcaatgtcaagacgagctttagccttccttgcctgctggaaagcccgggaccggggcggcacgcaccttgatttgtagcttgtcgcaaggccgtgagggaaacacctcggtaaagagctcggaagccttcctccttgacgatcgtgtaggcgcagtgcgcggcgtttctaacgatttcgaatcgaccccgatcgaacattcgtcaggtgcgttcgcatcagacttgccggacaggcatcaactcaccggtacttgggtatatcatcgggatcggccaacgagtgatgttgtgcttgtagccggatcttgacaacttccataggggagacgacggcgaccgcttccgtcgcacctgccaacaagcccgctataatttctcgaccagttcgagtgagccggtattccgggtcgactggctcgagtagcgtgaagactgaccgacaaagacccgggaaggtggaagtttcccatcttgaccccctagcgcctgtttatacgctgagatcccaagcgttcatcccatatatcgtcagttcccggttaagttcacgctcgttcacaggagatccgctactgaccctcgaaactggcaaacctgatggccatcttgggtacgatccccgagacgaccgccccgagtcccttgtaaagccccagaggcgtctcacgggcgatgatctgttgggccgtagcgatcggtcctagcggtttgagctattcaagaacatatgactctaccgtcagtctcgtgtccctaagatggagtggcacgtatcggatgggcggggccgtagactcacgcctcgggctttccggctcttgctgagctgcatcctgactttaatcgtatccagcggatgactatcccacagttatcaccgaccaatctgtcagcctcacagaacccgtagaagctggtactcctttacactgtgcaagggctcaccaaacgcatgcttctgacagtcctgcgattcctcccgctatcaggtgggttgtaagcggtaccttgggctttggtcctgaggatgacgacgagggcgaggaggaggaagaggcttctttcgatcggtctgcagggggtagacgtatggtgggatttggagcggagtatcggtcgcccgtgaggcctccgccgaaaggtttcgaagtcgaggtggacatgatttgtcggaggtggtgttcaacgaagccttggagttattggctaatacagatagcagataatctggggttgtcgggttcgactgaacagctcagaggtgttaggcgtgtctagcttgttgaagcgatttccatcggcctctaggcatgtttctcgacccccttctatctttatctatctggacccacgtacccgcccggcctgctgatcgacaacatctcgagttccgggaatcgattacatcccggccggaataccgtgactcgcattcgtcaaggtccgtcctcgaaagcttctcgcccgaaacgctcgaccacgaccaaccatccaaatcctgagcaacggatcctacgaaagccacaatagccgggcagagagaggcagcgctgattgcgagagcaggggaaggggatgacgaattatctgctcccgctgtttagaccactctcgcgcggagtccccggacgtaaccgggacggccgagcagttagacgagggatggttccgaacaagtccggtcgtgaggctctttgcgtcgggcgttgcaggttttagcgggtcagccgggacttcctgttttggtttggttttgaattggttttggtaagattgtgggctagggcaggcccggagtttaattacatctgggggacacgtcagatgtctgactcgtagtatctatcttgaggattctctctatccgcctggtgaatgtcttccttatggtcggttcgggtcggggtaataataatgagtcggtgtttcgaaccctcgacgtgcaacgtgagctcgaaaatgatgcaggccgtattcaacgatgatcacgccaggcagcatcgccaaggcgacacatgctgattacagcttacaagcctatgacacgccttctagaagtttcggacgatcctcgtgtagttcgaggatcgcttgcctgcccgtcgctcatcggcccttcgccggtcgacaggggtagagatgaaacgtgacgtgggcctgctcctcttgcccttgctccggatgtaaatccgcatccgatgatcagttgatgggaattctactttttgatgatcgactttgcaggattgatagacggtcggttcgcttttgggctgacgaaagcggtaaatctcggtcgaggtctttggagatcaacgatacttgatcgcgaatcgacttcatcattctcattccacatcgtttgcacgcccatccttgcacaacccgtcacctgacatagtcaagaggcaagagaaagcctgcattgccgccactgcggcattgccaaaggaccgcgccgtctaacagtcacttcagactttatagaggccacagaaaggtctgacctatacctttggaagtaaacgcacgctcctttcccgaccaatcccaacacatccgaccgagcgcattccacagctatggatcctccacctagtccaagacgagattcgacttccgccatgttaccgccaaccaccaattctccccgtcgaagtagctcttcaacacctactcctgccccgaagatgtctgctcccccacctcgccacaattctcctggactcagctcttcatctcaacacggtccgcctcaccgtcgatccctacaattccgacccaagtactacgaaggtagccccatgcccgcttccaccccagcttcctcgatcgatggagatctagatgccatctccgaaatggaagtccctgtcactcaaccatacatgtctccgagcccgaatcaagcccacattcctcatcatgcacaccgacctccacccaatcgatcgcctcgcaacctggtcatctgcctcgatggtacacacaattccttctgtgaccacaattccaacgtcgtcaggcttttcgaattattggagaaatcggatagacagctgtgttattacgattccggggtgggcacacagcagggaccttggttgtacgggctgaagaaggatttcgccatggtcactgacttggctttcgcttggtgagtcgctgtggcaagatcactgtgctcttctcgactgatgtaattcggtactgattatcacatcacggttttcgacgggcaggaacttcaagacccatgtcatcgatgcatatcgcttcgtgatggatcaatatcagtaagctcgttgaagacgatgtctgcatcaatacctcttccgctaacgcaagatgcggctgctacccagagatagagacaagatctggatctttgggttcagtcgaggatcatacgccgcccgagcgctttcggggatgttgcaatacgttggcctgttgccgaaaggcaatcactctcaagttcctctgtaagtcttcctgtcagtccaattcggttgatgactaatctcctccccctctgctggtactgtatacctggtttgtagtgcctggagcatctacgcagcttccgccgatatccctttcaccgactctcccttcgtaccctctcccaaagacaccaaagtcaaacaagcaggcagatcaagtcaatacgccggcacgccggaagagtacaagaggatcttcagcaggagtgttcatatccctatcgagttcgtcggagtctggtgagtctagatcccggaagatcattctgtagatttgataccgttgactgacagtgcgggctctatcagggataccgtttctgccttgggaatcaccaagttgccaaacttgccgttcgcctctgccatcggatacgtgcgatactttcgccaagctctgagtttggatgaaaggtcagtccatctggtctttacctgtccaaagacacgatcggctaacactgtgtactccaggcgagccaagtttgttccggaatattaccatgaagaatgcgaaccttgcgagaacggcaaacctgctaagggggtcactacggagaagcaagtcttgacgcaaagggacaacgggtacctcagagtcaaagaggtatggttcttaggatgtcattccgatgtgtaagtgtcagaagattcattatcagcttaacttcaatctgaccgtttcggactgcagcggcggaggcaacactatcaacgggcaacccgcgctgtccaacatctcccttcgttggatggtctacgaagcttctatcctggggctcaagatcgacaacaatgctctgttctcttctcgaatctataacaaccccaagtacccaactgtcaggcgcctcattcctcccagatatatcagtgttgaggatttctcggccaaacccatcgaagacgagagtttcctgcactaccgcagcgagtcggacgatacgcgtgcccaagctctgatcagacaggccgctgaatgggatgcgttaccgtttacccccctcgacaagaaccttccggtcgatcttaggcaagagaagcaggaaagtctgaggggcttctactggttgttggagtgggcttggctggaaaggtgggactatatcggaggcaaccgacgaaagctagtcaagaggtaagcagcagttctgatatattagtatctcggagacgtcatcaaataacctcctgcaatgcagtcagaattggggaaaaggaagagagatcattgaacagcagcgcatccaccgatcagttctcaatcgactctcctatgagctccagcagaaagaggccaagacgacccttatccaagaggtcaaaaccgagatcagaaagactttcatgtcgaagaagcaaaagaggaagctggagagagcacaggaagtcgagtggcccagagcgagtttcgctgatgggtgtacctgggaagaaattcttgcgaagggcccggatgatgacatctgggagatcgtcaggccagttgagaatgactgaacgacggtccatgggtatcgatacccgggtcccgatattgcggaccctttctacacaacgaccgattttctttcagtatttcgcttgcgggttcatggcgatcgatcgatcgatcgcaacttctttacgtgtattgattatcagttcccagtgttcaatcaaacgctccatgtatactatacccacaacccgacctcagctatttgagcgtaagccatcatttcaatacaatatcaaacactttgtatcgatcattctgctcgtcgctagatttcgagaccttatccatctcgtactcctcaaccgtgacatcatcacgtagaccagcatgtcgtttcctctcttccaggacaggcatgtccgaaaccttgaatttcacgcgatatcagctatcgggagttttgttgtactgccaagccgagacttacctcaacatgggtctcaacgttgactcggacttgagtatgttcaccaatacgagatcggtcctgatatgtgttggcttcattgcgggtcttttcgcgctcataggggtcgcgaaagtccgctcgactgcgaatcagatccagtaagcttactaccactgaattctcgtgaaccgaaacttacgagtttaacgagtacagcatcgcgatggcatacatgtttcccgaaagcatcaagtaagggtaacctgcagcaccagtacggtcaggcttagccggtaggtagaaagcttaatgtgactcactaagctcgttgctgtgttgatccaaattttcaactatgtcaatggatcgtactaaaagagcggtccaggcgatacccacgagaaagtgattgaaaaatggatggcaacaacgagacagaacaaggtaggcggcgcttgcgactccattgtcatcaccgcgagtttgcgaatgagcgcgtctgtttgagaccaaccggtcttagaccggataattctggtaaggatcaagcctgtgatcatcaagtctctatgtataacgaattgcgatcagtaatgtttggcgctctgcttctcgataatccgcttacgaagcgatcgttccgaagatatacacgcaggctggaagacgcgcacgcaaatggggatgagcatcatgggcaacaacgcatgaacaatcggacccacagaatattcgggattgtatgtcctctcgaatctggaggatactctcgacgctactcaagctatgctgtaatgataaaacaaatcgtcataaggatggattgtcaagctttaactcgagaagactattacacaccatagtcccgattgcggcagagacactgatcgccgaaaagaacatgatgatcgtgggaacccaccaagcgttgttgtagagtctccaggcctatacaaatcggaaatgagcttgtttaaagttctttatcgagcgtatggcactcaccttatgcgcgtaccaggtctacagccacagcaggggcgatcagcatcttccaaagcgacggcggactataaaaactccaagggttactgacacttgtcaaagcgaattggaaccctccgagtccgtatagcggtacgatatagcgtgattggaagatgacataccaatgtccatggtactggaagagttgtctgttttagtccgtgcgcgaatcttgcaaaggcgactttccccctcactttgatgaacacgctgaacgtccacgctggcagacatgtaaatcagacataacatcgtcaatctctggaaatccaaggtactcactgcacactgctgccgtggtacccatcgacaggagcatgaggctcgcgacaaggcctcgggtcatgcgcgaatcactcttgccgtagatcatgaagtacttgccgacctgccatgttaagatcccgagcaacaacgcattgataggcagaggagcaaagatcggagccagagtccggacctcttttcctttgagcgcgatcgtcaaaatttgatcggtcaaggtgttatttgcgagagcctgggcggagaagacggagtcggacatgacgcgatgctatgaaatgcgagcagaaggttttacgatgcgtatcccggctatgtcctcatattgtgcacacatcgatgcataaagatatatacctcagtcgttcagctgttggacgttgctgcactcatcaaaagcagaatcaaattgctgatccgtgtgatgagccgggagatcgagatcgagaaaattcaaaagcccgagagcgccacgcgcggcctcccgcgattgccaagggtattgatgaaaccctgatcgagattgatccgctcatcacgggctgaaattgaggggttcggtcaggagtgttcgtgtggaaaattctttgcccatgattcacttcgctccggactcgatcgagactattaacttgattacgtttcggaactctgtcaaaccttgacgaccgcttacgcttgccgtcctttggcttttaaattgcctctactactacgtttggagccgcttcccgagatcagattgatgacatgagcgcttgaaaagattgggcagccgaatcttcacaggcgagccaatcaaaaactgaaatgtggtgggtttgctagctggatgagctgggctggtcgcgatattctttaccttgagtactcatctgtgctccttgtagcatggggcttccttgcctcattttgcaagggcttaaccacgagacaaccgctcgaagaaactcgttctcatgggcggtccgttgagagttttgtcgagatcgctagacatggagacgtccagcattctgggaattgcacagatatcttcctttgcctttgccatacggtcaaaacgacttccaagccgtcgaggaatgtatccgcgagattcgacaatgtacatcatgggaaagtaccatatcatatcaaacacgattcaaccccacaggacagcatctctaagaggacgatccctatttgtaatcctcctctgacgacctgatcgacctatgcgatttgatagatcccgtctgatcgtttcggttgtgacgagaaaattcactcctatattcgaccagattgttcgtcgattccgtcgggtactggtgttcgaggccaaggccaagatcaaagtcgttgttgtaggcatcatgtcgacttcggccatgcttagacaaggcaccgagttggagtacggcagggttgctgcacgatcatcgctcatatcagccgaaagtttgcgatacgcaagacagtcaacccactcacgttcgagcatccatagcagagtgcctcttgttatcttctcccgaaccgtaaaggtcctcaacccatgccgcatcggcaatgctagcgtgactgagatagcccattcgtcagaccataatcatatatcgccttgcacggtagctacttactgattcaggacgtgcaagatgcaaatgacgtagagcttggagctcaagatcatggacggtaccgccgaatcgacccttccagaaatggtgaacatgaggaacacaaaaacggaaaaggctaaacaaagaagcgtcagcagctagccaattaaatggactattctcctacgctactgaccagtgggcaaagcgagactctcggcggctaccaacaagctcaaaacgaccggcgatttgcggaacccttccagtttgcctgaccgcttgaagccccagatggtgaggatggttccgctagtgttctgctcggcgcatcgggattagcaacagccggggttcgacgcaatgcctgctaccagtccgactcaccacaaacgcgtgcgagtaaacactgatgttcattgcctacaaatcagaacccgtcgaatcagtcatggtgaaatagtgttcgccagcccctcttgcttaccgtgacccaaagaggcctagcggcagtcgccatgaccgtcgtgtctttggccactatcgcctgtcgggaaccgtttctcagctcgagatcgtctctagagacagtacaagttactcacggttaggatccccattgatacggcgaacaacaagacagctggaaacaagaccgctagaatgtaccaacttttgaagagcttccagatctacgacgatcgaaaaggaacagcctcggcgtcagcgttctgtgtttcaagcaggcccaggacaagcaccgaccctgatgatccagtagatatgggccggagtgacgaggaatacgccgaggatgtagaacgccatatagaacgccggatcgtagatctcgtggaaggtcccgaattgtacgacgagctgccatttcgaatcgggtcagctcgagccggaattcgaagggttcctcgatctcgtgacatacagctttcgtagtccagacccatctaagaatcaaggacgagtcagtcgaaacttcgacatgctgagatcccctgatgtactcacaggttcaacgttgtacccagtccaatcatcaccatccacatgatcaggaacctcaggggccaccgctgaagtccttccgaccgccggttcgtaagggacgtaaagtatgaagtcgccatgatccccaagaaccccaggagataggcatcgactgggatcggcagacaaagtcccccgaggaatctgaaggggtccgacttgacgaccggcttcaggaagaagtcgagctgctccgacgtcatgtcgttgaagatgacggatgaggcgagatccatggtgataggcaagatactagtacagtcggagcgctttggaagtgtggtggacacagcacttctctttctcctagcgaagagatattggcgaagggtctcttcatcttaaagctatttatctcactcgttccctttcgcaatgaagccacatgggcgtcatgcgggacgacgaggggaaaaaaatcgtctgcatcgtcgagatcgagatcaaggcgctcgtcctggtcctgatccaattgacggtgctcctgccttcaattggcaggagggctgacgatacggagggcgcgaacgcatcgggccagaggaaaagattgatgggattgatggatcgattcccgaaccgaaggtttcatcgtcccttcttttcattcccgtcttttcgctgcgctcgctacgcttccaaccctcggccttcgggtcttccatttctgggagagtttcatcagccccgtgtcatccccgtttcgaaggcgttcggctgggtaatgaggtttccagaggttcaaatgccgtgatatgattcaaaggggtcgctgctgaggaaacgtttctgatcggatctcggacgaggcggatggtatcgagagttgcaagctagattggagcctgtgatccgatggacgggtctcgtcaaacaaccttgacgggtcaagctgggtgcaatttgatgccaagaccacctgagacctggtcaggccatcgcgggaattgtgccaaagtaagagcctgcgtcacgagcagagattgcctccaaagtctcaatccaaggttgtggcatatccggttactggtttacttaacatttggttacgatatgccttgcatcccgtacttctgctaattctggtctcaactggtcttactctgcagtcgaaaggccgacgctcaaggtgcttcggccgacggagcctaataatacatgttcaagattaggttccgcgaatgatgacgtagttgggactggcccgaccgaagggagacgtcagcaggggaatacgggtatcgaggtaaaccatgttgtatcgagaatgatcgagtgatcgagtgacagggttgtgccggtcaagcagttcaaggcgcatcactcatcggacttcagatcgatcagtaaatccagatcttgaacccaagcaacgctccttggacatcagcagccaaagttcatagtgcaatcaagcaggtatcctttccagtcatgtcaggaggtctttctcaatgctgtgtatccggccacatccacgccgtaagtttcgatgcgacagatactaaaatgatacggtttccctttatgccgaggctaactcaacggtcgttatatactcagggatctcccaagggaacatttgaggatttcggcgggctccgaacctatgtatccaagccggaggatggaagcaaggcccgtagcgttgttttcttgcccgacattttcggcgtcgatatcccaaatgcccagctcttagcagacgtgtcagtcgactgtattggctctggatcagtcgatgatataatcctcacaacctgcaaatctcttctagctgggccacaaacgggttctacgtctatatccccgacatcttccagggtgagtccgcttgaccacctcactggcgtattactttgctcatacatcttatgttcgtcataggcgatgctgttcctatcgagcacatcaataccatcacccccaagaagcgagagcaggatgccggtggcatcactggagcgatcaagaccaacgctaccgctgcctacgatctggttccttttgtcaccaagcacagagaggcggtagtcaagcctttaatcgacaacttcctcaaagctgtcaagtctgatcccgagacgtgagttgtgagcgcttgaattgatacctacctgtatttttgtctgagacgtatactatccgcagtggcaagatcgtagccgtcggattttgcttcggcggtcgttacgctttcctagctggccgaaccgactcgcccgtccaggtcgacgtggtggtcagctaccacccatcgctcctcagcgtacctacggactttgagaacctcacggcccctacttacgtcggacatggtaccgccgacaactttgtcaccaatgacgaagccatcgagtccgccctcattcaggcggtcggtaaagagaagctcttattcgaacgttacgaggacgcttcgcatgggtaaatttccaaagcttggagatcgtatgtataccgctctcgtggttgaccttttttgtccccgactcatacagatacgccattcgaggggacgatcttaacgaaaaagagagaaaccagaaggaagagacggccaagaatgccatggctttcgtaaacaagtacatgtgaagcgcgcccgggcgtagatgtacgtcgtaggatatgaaacatgtgtcatctccttgagttccagcatgagatgcgcttcctttaaaggcgtgacggggccgtttcatcgagggcgagggtgatacaagaacttcggaaagcacacaggcgactagcccttgaatacaagtcttggccatgaccatgttacgcacggccgccatctcacctaagctcccttggcaaccgagccataaataatgcgcttccttcctaccattttggcttacggctttggaacggtgttatggtcaagcaggtaggcattgatgacatataccatctgtaggcatccttaagctaagaccgctgcttctcgcctggtcgcacagtctcgccgttgcgaaatgcccacccagtttcagcaggcctgtcttgaacgacctggttgaacctgaagatccagatctcgactcgatctacgctgtgatggcagcccgtgtcggggtcagtctgtcctgacggggcagtggatattctaatcctgagacgatatctcgtgcgtgttcaatagtcgctcgaatcgctggatgtcgtcttcacttccgaatgtctcatcagattcaccaacgggttgtcgtggcagaccgctctcaatgagaatgatacttggcatgaagctctggctcatgttatatcgatgactctggacaaggaagaacgacttgttgcaaatatctccagattgttgagcccggcaaagcttgaactgtggtcggtcgaatccgcttacaactcgagcgtcggcgtcataaaggatgccgaagatctcaactcgcgattgggcccagcccgagccgatgtaagacgtacttcattgacctatgtgcctgtctcgttcgctgatacgattgtttcgcatgatcagggcattttgctgcaatattccgatccagatagtttgatgacggtcgtcgactgggacgtatcttccaaaaacggcgtcgtgtcagaatggagagctcctcaagatggtcctgctgaccaacgcatcaacaagacggccgtcatcggcacattgtgggatgacaagcacaagccaactggcgtctggatcccggcacagggaaagccatactttggacctggacatgcgctcgccacgtagaacagacacgttctgctttacttttggaaacctataccgcatgacgcttcatatacaacctctgtgacttcgaccctatgcacttgtgttcagctttggcagcaaaagctttgccgattctctcacgtgtccttgtccttcttctttcctcccagcatcgatttgaatgccgcactcgagcttcgcgtgagtcccggcacgttcatgctcagacgccgactcagcgagcctcctgatgtcgaacgcgtatccttgacctgaggtacgtccttcttggatgtcatcctgcccaagcccaaggacgacatgttcgacgtcgtcgtgtttgtggtcgagtttggccgagctgccggcggtggcgactgtgcgagttgaggcttgggagccggtatcggtgatgcgctaggctgcgtttgacgcggaggcggggccatgccctctgacgaagccgtcatggtcgacatgaaagagctcgacatgttgccgctggcagcaggggtgggtccgcgtgatatcgagccgggcgtggcagtgccgggactcgtcgcaaagtcggcctgaggtgacacgccgagggccgaggttcccatgctagacgccgttcccggcctttccgatgtggatgcggtcctctgccgcgaaggagtgccatttgtgccgttgctcggggtgtacatgggcgtggcgggactggtgccaggtgcaccgttggatgtcgacgaagcgggtcgagccgggctaccataaaacgagttgcgcttgctggtgccattcttgtccttggacgcgccgaatttgggcatccatttgctacccgacttttcagacctgctgaggctattttgcgattgatcgtagcccagggtcgagctcgcaagaggttcttggtccatgcttggggtatgcgaggtctcccgggccaacacgggtgtctgtctggtatcggcggtgctctgacgggaagatggaatgggcacggaggcttgagtcgaccgagtcatgctgggttgacgaccgaccgaggcctgataatccgccaaagccgcctctacctttgcctgtgcgctcatcttggctgcagccacgcccacgggttcgacatcaagcataggcacgttggtcgagaacgtcggggatgacatggggtccagcatgtccgattccatcgtcgccggggtggacatggggatactatcaggttcggcgacgagaacgggaggcgctttggtgagacccaagctgacgggatcaatgtcgacggcttggtagaacaagacgtaacctgcgccggccgggtagtcgccaaagtatcggggaatatccgcttcgtcgacgggctcgacattttcgtcatcgtagagcagccatctaccctcgttcttgacgagggcgacgtagtggccctggttcggacccctgggaatggcgcacattgtaggtcagcccgtggggaacatgatgcccgtcgcccgcataaccgacgctactcacattccgatgtgtaccacgacggcgtacaactcgtaaagtctgtccgggttgctgacgtcgtcgctcgtgttgaacaatctgagctgcatggggaagacgacccggtaggccagcttgacgaatcgtccgagcgattcctggtatttgaatcgcttcaagtggagggccaagatgttgggcaacttcttgatcttcatcctgcggtcgttgcaagggggggaggggggggaccaaacgcttccatcagcacggatgatagtgagggaaccttaccccactcatcgccacgccccctgacttacgacttttcagcctcttgcaacccacaacaggtgtcacagaaaaacttgttcttctggcacaacatttcgctagccgagaattgtctcaagcacgaggttacggacgagttttgttcgatatcgatcgacaagtcgaggaaggattcatcccgggacgaggtctatccaacccaccggggaacacgtgtggtcagctcgaatcgaccctgtttgcgaagcgactcccatgcaggtcccccaactcacggtctcgcacgtcaaacacctggtctcgttggtcaacaagccctcgaacaactgatgcaccaacgtcttgccctctcccgctccgaaccgtttcaaccctcccaaccgcttctccctctcttcgcgttcttccctgcccatgctcttttcgagctcttccacgtcctcggcgatcttgttcaacatccagcccaaaaactcgtgagcgtcttgatgcatgttgccccggaacagttcattctccctcttgacggcgcggacgagttcttcgggtttgacgactcccttgcccatggtccccgccccgtggggtccgcctccacggacaaagggtcgatcggggttgtgcgggttgaatagggtcgtcccacccgtggtctctgcgcccggaggtttctcctgaggcggtttaggcgggggaggtgggtgtggcagggtggtgcgctcggtcaatttcaggcctcgcgagggggggggggaatagattgaagggagattgtaggagcaagagcccggtggtggtggcacagccagaagccagatagctgtactcgggggggtcgtcgttctcggggtctctcgccctcgccgcccctctgcctctcttttcccgcttcatccgagcaagccagcgagaggcaggcaaagaggaggtgaccatttcgtttcgagcgcgcggggaaaattcaagcgagattgtccaggtggtcacaatcgacgttggttttggcttgccagggagctagctagctagtagcctcgtacgctacgacgtctgtcacgactcgtcgatcatcatatcgttaccgtagtagagggagtgtacttgatgtccaggtagttgtcgtcgtcgttgtcacccccggtcacctgcacctttgccccccttcttgctctgtgcgcgcgtcccaaactagccagctttcggcaattcatcatccaacagccaacaggccacggctacccacctcgtcggattgataacgtcgaaataaaaatccaattcaattagacacacacactcacacacacacgcacacacaccactagatcaccaggttacaagacgcaagatcatcacgagcgtaacaacaacgtgataacagcaaggacgatctacccaccccccgccacaccacgcactctcggaaactgaaacctcttcgtgtccagctctccctcgagactgtagtttcgccttcaggccagatcgtcccttcaaacccgctaccttcctctttttcgccgccgcggccctcagcctctgtcgactcgcctcgacatggctcaagtcgtgccctccctcacttctctcccgatggactcgacggcagctccatcggtggaagacatccaagcccgcttgccctcgatctgcgtcgactacctctcccacgactgggccgaggaagacgtctgggcgagttggaggtcgatgacgaggcacaagaacgagattgctaatggcgtcaggttggagaacgctagttggaggacctggtggaagcagaggaacaagctcaagacgatcagccccgagacgttgaattggtgagtgtcggttggtcgtcgtcgtcgtcgttgtcgttggagcaggcggagcaaggcgagataagaaggataggacggtaaagactgtgacgaggcaggcgggtggggcgagacgatcggacctcttttttttccaccgacatgtcggcaatcgtcaacggtagaattctaggccgtgacaacgtcaacgtcgtggtggtcgtcgctccatgcctcgtttcctgtttgacactgctaactcgctggcttcttccccccgcccgcgttttgcgggtcgacccgcaaccctcaccaggctgaaagattccgacgtcacctggctgtacggaccactccataccgccgtcgaacccgtaccaccccccaaggtcgccacggccgaagaacgactcggtctctcccgagcggatagcggtagcgtccatggctcggcggccgccccgaccaaacccatcctcaaacaccgcaccttgtcggaaatgttatccatcccgaacccgtcctcgcccatcctcgaagccgtccgtgcggaagaggtcgatgatcacgatctggacgaatccaggccgatcttgttgcacaccaagagcgataccaacatcgtcaccaaggggcatcatcaacgacgcaagtctccggatcgaggtccgatcacctcggggaacaggaccccacaggatcaaccggccagcgggtcgaggacgcccgtcgaaggcgtcctgccccccgccccggcgagcaagaagcacatcagtttcaacacgtttgtcgagcagtgcatcgccgtcgacgaccctgaagagatcccggggatcgaaggtacggccatcgaagagcgagacgaggatgacgacgatgatgacgaggacgacgatgccgtgctcgagatgaggagcatgtcctcggccggttcgtcggccaggtccaactcgatccgttccaattcgacccgatcgtcccgaccgtcattgtccaggcaagggtcgtcctcgtcccagccggatcacatgaccattgccaagatcgccccgacgacgctcaagaccatgggcgatttcccctcacccagcccacaattggcgtacgcacctacgggcgagtatgcggaaaaactcggacacggcagtcgggatgtcgtgcaagaggacgaacccgaagaggtcaccgcgtacaagcaacaggcttcgagtgggtaccccgtaggcaacagccgtgggagtggagacaaggacgccgatggggtctcgcctgattcggtcgggtcgcccacctgggacgacgaggacgattacgccgtcgggttcgactacttttccggacctgatctcggggtcggggacgagtacgacacggccgccaaaagaggagggaacggtacgaggaccgttcagacccataccggaagcggggcttcgtacggcaaaggaaccacctcggcaccggcagccagctcgaccggagctcctaccgtcggtcaggtccctcagcagcccaagtggaggtcgccatcctcgggaacgtcgtcggcttcgacctcgggcacggctacacccaacgccaagtcgacacccccggataatggggtcagctcgcccccccagccgggacggagtatcctcaagatcagacctcccggatctcaacaaccatactacgagcccgaaacgagccctaccaacagtcatttcaactggaaaccctcggccgctaccggtcagggtgggctggaccagggtgttcgtcgagtgatcaaggaacccgtcgcaggttccttgccttcgtacgatgtcaacgattcctactttggtcagagcggcagtggcggagccggcaacgagacgcctcctttagccacgaccgaaaaggcgaccaccgcttccgccacctcgcctggtcgggatggcgagtccaggggaagatccgccgtgaggaccggcgtcaatgtcgcggaacggagcgccagccgaagcaccggcaacgctacggccacgtccatctcgcccagttcgtcacggacggctgtccaggcgcccaccacgacgagcaccaacaccggcgccaacgcaaactcgagctcgaagcctaaatccccgcctctggcgacggacaagccatcggcaccccaagttcagcgcgctgtcggaatgggcggcgtcatgcccaaggacgatgtcgacatgaagagggaagaggaagccaagaaggacgcagagggcgaggtggacaaccacacggaagagtacgtcccggaccgtggtagcacccccacgccgcattcttcacctcaggtgagcggccataacaagctctttctgacctcttggtgttgattctttcttccctacccgttacacaggtcgcgatcagaccactagtcgacacctctcccgcctcgcttccacacgctcagacggtccatgtaccgggaaagaagcaggcgagcggtagtgtttcggcggcagaacaatcggcatcgacattaaaggctcagaacagtgtaacattacaagtcggcggacggcggcatcaacgaggagcttccatgccgaattcgactcggcatcaaggggacgaagacagtggactgatgagcaacattgcgacgacggccaaggatctctttggagctttgtggacgtatggtggacaaccgtcgacatcggacgcggatccgaaacgagaatcaaccaaggacgccgagtgaagatctctcgaccgcaggagcagacacatatagacaccttgtgaaatagctcgtatacccggacacctttcgctcgcggcgatgcgtttctctctttctcttttccaattcccatctactcgaccgagtctcacgacacaagcgattttgtagacctccctcgtcgcggctgtatttcatttagcattcgactgcatcttgtattcacctctatataggctttagaaaaatcgagaacgtaaaaaaacgcattcatcgagaacggaccccgtatagacgctcgagacgtcgaccaaaatacaacaaggaaatcgaaagtgttaaagcagaagtaatgtttacacgtcgtcgtccatgtagtcgggataattctccttttccgccgcgcgatattcattcaccaagccttgtaccgcttccctgtaaacgctccaagattcagttgccggctcaggcggacaagcaacacgacaccgcctcgagatgactgacctcgcgctgtcaaactcatcaaagttgtccttgaacatggcctcggatttatacacgtgcaagtacgatccaaactttcttgattgatcgtattctcggagcatccggctgaagcgctgtattcgggccgtcagcttgacatcggcttggtttcgacgaatagctcaaacttacgtgagcgatgccagtgtgattcgctagcatcaagccgctgactcgatggttcgaaggcgaataaggcgactttttcgccaacgctacctggatagaagccgcgccccatggaatgaacctggcgagttgccgctcacgtatccgtagtaatgatttatgcacctaattccgacctcgatcgttagccctccgaaatgacctagacatgattcgggcacactcacatcggtggggtctacgtccccttgaatgatattcaggatggacatgtagcaactggaatcgctcaacggcgtcgatacgagtcgattcttgggctgcaacaaacgccgcatgacatccagcacggtcgttttccggaccgatttggcctggataccggcggcaaaaccgctgcgtcaattgggttcaggccgagtccagcgactgtgagacccaccttgtcaatctcgtcacccgtaaacggcgtgtaggccgtcattaaaaagtggcatcgcggtgtcgggatcaaggaggataccaagctgacgagatcattattcatgtaacctggatatcgcagcgttgtcgtcgacgcggccatgaccgtcgacacctgcaaagttgcgcgaggtcgtttatcagccgaggtcaaaccctcacttcctatgtctctctcaccaattggttcgtctgcctgaagctggcttccttctcgtccatgttctgctcgaccaacttgtgcaactgcaggttgtccaccatgatcacgctatccgcattctcgatcagcctcttggcggccagcagattgttgtaaggctgaacgacaacatcgccgacaccaggaaagaccgagtaagtctggatgatcttcttgggaaatgcgtccgagaggcgctccaggaggaaagagccgagaccagatcccgttccacccgcgatcgaatgtgtgagcatgaaaccctgcgagcgtgccgtggccaggtcagataggtcgcggagcaaggcaatatggctagactcacctcgaggctgtcactaccgtctgcttcgcgattgatcaactccatcatctcttcgtgcccctcctctcccagagcatatcctttcgcccagttatttcccgctcctccgccatccttgttcacatagacgttctccgggttgtacaggtctttgaatgcggatgtctggatttggttgataacctgtgcaagacgaaatcagtatagaataccaaaagtgtgcatctctgcgcgagcttcgtacccggggttcggtatcgatcaagatggccctcggcacgtaatgatcatcatccgcttgatagaagaaaacatccttcctgtctccagctggcgagtggaatcccgagggaccgctagattccccggcagcgttgaccggtgtcgaggggagcgacatggtactccccggtgcccactcttccacagtcccattcggggaaagcccgtgatctgcacagagctttttccaaaactacaacggatgaaagcaggttaggtgaaaagcttgggagtgcgatttcatggatgcaaacctccgatccgactatgcatatcgcatattaagtcagcgatcagctactcttagcggcctaagaggcgctgggactgactctgatttccggcctgacccgcctgaagggagataatctccctgggcatcttggtatttcggtttgtttacgattctttgtttacgtcgcgaaacgtccgccgtatgagatcgtcggttcaagctgttgctgtgcaatgactggtgctgtagctgctagtaagcggagagataatatcaaattttggcggctgagagttgtgtaatgtggtgatcaagactaccgatagtctactgaataaggtaaaagagtcgaccgagtaaatggttgaagcttgaaggtcgcgacgagcgtgattgatcattcggaagcaaatttggaaacgaatatgcttccgaaatccaggactcgctcatcattgcatcgaaccccgtcgacatggttgtcatggtgattatctcaattgtctcccgctcctctcgctcgtccagcatcgaagaggcacgggagcacagtcttgctgctaatcattctacctcacactatccacacacggcgaagcaagaaagcaaaataattgataggtctttgaaagggtacagcagaacgacgtagaacatgttcaactcgctatcgctcggcagaaataggaacaacaactcggctgcgagaccggcaaatgaaaccctctctgctcatcctctgctcggatcgtctggttcgggaggtgcagtttctgaactcggcgtgatgacgcctggttctggtgttggcgaagacggatcaaagggcccggtcactctgccttacaaacctcgacaacgtcatggtggaggaggcggttctcaaggcggctctgtcggggtccctgctgtttcatcttcccaatcagctcctgcactcaacgtcctctccgctagcaagactcctcagccttctgcagtgaccaccgcgtccccggcgttcgcgtcgagtaacccgtccccgaccggtcaggctggcaatagcgtgacctcgcggctacagctccaatcgctcaaagcagccggccagcgtatgggtcttggaaacggttcggctggaattcagatgctcgagacgctcttcgaaaaggcacaggtcagccgatcgggctctggaggtgactggggcgagatcatcaaagtcttgacagccggcaaggtgaggcgcaggtcaggtcccacagactaggtttcaccaatgatagcatgactgatctactgaatttccctcataggcgacgttgctgcttccttccgcctcggcgtcatccttgccggtaacgacccagactctgcgggatcatatcatgttccccgcttgtggcacaagctcgggcagtgtttttgtcaccatgtcaggcctgatcggggttgttgaggagtaggtgctgatgatttgctcgcttcacaaagaacccgctgataatatgcgatcttttctcagaggcaagattacgtttgaatcttgtttcagcggcgacagtgcgctgcttcaggcgctgaaggaccctaacaccaggaggtgaatatgccagagagcctgtgctacaaaacgaggtcaattgctgatctgaggtccgccttccacagttctgctctgtcaagtcttcagcctctgcgtgcctcgaccagtaccaatctgcatttcccgtcgttcaacacgggcgataccaccggtctcctgcccttcccgccattgcccccacccccaccctcttcgaacacgggcaatcgctcgagatctggaagtaacgccagcttggcgagcatccctccgattgcgtcgtcacgtttgaacccctttgcatcgttgtttgggagcagctcggccgcctctaacaatacaccgagcaccccaccaaggagcggtgtggccgagctgtcatcatcccctagtaacgttccgctcagtcccagaccaccatccatcgtatcagtttctctctccgagacttcgcctgaccagcaggcgggcagttctgagccggaaggcttccaattccccgcttggtccgtcgacaagattatcaagtatggggagatctgcaagtcgcttggcaaagcggttcgaagaaacgtcacggatgagctggaaggtcttcccgacaaggtagtcgagagagtagcccggtttgtcctcgcttcgcatccatgctcagccgagagcaagaacatacccggcaccccgcttctcagcgtcacttcaccgacccttgacgcgccattggactttcatgcaaaggcggatcacgtatcggaggcattacagatctttttcgaaagcgtctacgacgatctattagcccattattcagcggccgtctcggtcccgcaatcgccttcggcgcttggcagcttgagacgacgaggtagtcaaaagggcaagactggtcatgttgcaaacgaggacacaccggaggctggtcagaagagggaaaaacaaagggtcgctgccgaagaagcggcagagagacaggcaatgcaagcattggatatcatcgaaaaggtggtctgctgtcttttgtacaatttgtgagtttcctgaccagactacgctacaaaggcgccgtgttgaccctttttgaaaagcctctttgctccttctacagcggacgatctcaaacacgacgaggctttatcttctcgagtcgccgcgctaaatctgctcgaactatctctggatcatcttggagtcaagacgagagaattcgatccggaagaccccgatccggaagcgctgaagcgagaccaagttgtcgccaaaggcctcgagatactcgttgagagagtcggacatggtgggtccaggaggccgatttacaacggatcaccttctttaaactctgctgtgccacagtcttgcaatcgctcgaagcgccggaaaatcatactcccaagagaaaatgcgagatattggttcaggcccacaaggtcgtcatcggtaagtgctataatagccacctttgttattgctggcgctgacccatatcgatcccgttgtagatggtttgcaacagctgcctaccattcgacttcggccagaaggagaaccttatcaatcgcctgacgcttctccgccgcttaccgctatcgaccaagcgttggagcagacgccggcttcggttgacagtgagacaggctctgtacctggacctcgtagcagtaccttgaactccacatcagggcaagagaagtcaagctactcaccatcttcgtagctggcgacgatgaatacggaactgcgatgtgcacctcttgcctcaacgatataccacgctttctcgcgatattcgataaagaggctgcgtcgacatttcaccagatcactagggaacatgaatacatctgggacgctgtcggagacgtttgtagctttgtagatcgatttaattaggccctacgaccattgcgaccatgattctacacgattgtatcgaatgccccttgttcccacgcgttggatgccgtaacctcgggttgttgatgatatcggcgacgtcgatcctcagagcgtcatgtcttcggcggcctccggctcgtagctctagcaacgtagaccgctgtgcaggcgcatcgtctttagctttagatctctaggggatagacaagcgtggacaaatagacaggacgacgttttctgcgctcagaagtgatctatcggtgtatatatggcttgaacggagcggctagtcttgtacaacgacgtggtcaccatgggcgaggcaggtcagtacgaaaagggccctttgatgccgagctggttgatgatcgctgatgcgtacggtccaatctaggcaattctcctgatgctacacctaggccggaagactcccatatggacgaaaccatgcaggtccctgagatcagattaccggacagcgtcgaccaatccgacctggacgaagcgcttcaggacagcatgctactcccagaagcatcgccaacgctcggcgagaaaccctcagctgatctgaaactgagtggcgggacatctggagcggacctcttgctgcctatcatgatctacgccatcgtcaaatccaacccgaaccagctcgtatcgcatctactttacgcgcaacgatatcgtgcagccatggccacgacgggagaagcacagtacgctgtggtcaatacgaccgctgccgtagaatttctggaaaatgtggatctggctgaattgggactttcgtcggcggaaaaagtgcttaggtgagtcgcgcccggtaattcgtgttcgaaataggctgattatcatctcattgcagcgtgacggatctcgacccgatcggactcacgcactactatcacgacaaagacgccgacactgccagcatcgtttctgcttcaagtcggctgcgcggtcgtgtaacccaggtgggcgaattggcgggatccgccgcaggttcagccaacaaggtcctcaccggtgtagtggactcgagttggacggcgttgcgtggattgatggtaccaaatctagggatgaagacggtagaggaggaagaacaagcgggcggtaatactgcgactctccgaccgaggttgaacccacgacgagcgtcggctttcactttggcaagcgtgacggcgacggtagccaatatcgccaacgctaccacacagcgacaacgcgccaagacgatctccgctccaccgatcgctgaagatcgggaactacatcccgtctcgagtcgacccccatctatcagagaatcgagcgagacttcagactcggaagcgcactcggatcgtggagagacgacggacgaggaggataccgagggggcagacgacgctgtgcaaaaggcactcggacgtaatcgacaggcgtccgacgtcagaagtatcaagagcgtttcgtcgatgctatctaaacccgaagccgacaagcacgaacgtttgagcattcacgaacggttcgcgaacatgggcctgcatcgacacccggatggctcgatctcctcgacagcagaaggcggcaaggtacgtttcaatctcctacagtctgaccgtaatctatctgaccggtggtgtctacataccagaccatcacgctgaacgacagccggataggacatccgacccgacggactaccttgctgaatcctatggcttccgagccgcagcccggatcgcctcccagctatccgtcattcgatctatcgcactatactaccgaggaccttgctccgcccatcgagcagttcatggaaggtacgtcgcacgcccgtgacttcgacctcaaacggaacttcgtgcttacatttctgtcgatactacaggtaatgtagctgatctcaaaatttctgacatcggagctctattgcgagactatcgacggctaggggatgttgttaaacgactgaaaagcgatctcgacaaggcgagcatgacatgatatacgacgatacggactttctttcacggcatcatcacggatcctttttgccagtcggttgtaacaatactgtagccattcgaaatgatcatatacatcagatcagattagtgtatgagtagctgactagaccatgcttcccgatcgtgtcaagtttaccgggaggtatgcaggggaagaagtaacggaccctgtctgaacggactccggggggggttggtctctctcctgtctgtctgctgaccgcgtggtcgacgtcgacgcgggtcagaccaagcaacaccctctagttcgccgagcggagcaaccaccgaagcggccctcatccttactctggctggcctggatcatcaatcgtcccgccatagtcgtccgctcaatcctctatccacttttcacttctttacctttctctactccctgttgctcctataatccgagaccggcaagaccgtcacttccatagcgattcccaccggacacaccgtccatcctctttccttccccgcatacccacacatatcactcatcaagccgccgtgtgaacaacctacctcaaaccatcatgtcttttccatcctctcctaatcgacagacattaccggtccgacggccatcccataccatgcagactttcggcttcaaccatccagcagcatcactatcatcggtacccgtagcgtctacatcgacgagcgagtcgacgacgcccaagaagaagaagcttacgcataccgaagcgctggagcagatccggacgttcttgcggtctcagagctcgtacgatgtcttccccgtcagctttcgtctgatcgtcctagatcatcatctcgtcgtcaagaaagcgttgaacacgatgttgcagaacggtaagtgcagagcctcggcttgatccgtggctcgacatcacggaagctgaacagtaccactcgtcttcttgttgatcaggtgtcgtctctgcacctctttgggattcggaaaagtcgcaattcgcaggcaagtctctttcgagcctttggtgcccggtgtatcaccattgagctgatagtgactgttgatagggatgtttacggtgtcggaccttattcacctcatccaatactattatcacacgacgacatacgaggacgccgcggcagatgtcgaccactttaggcttcaaagcattcgaggtaggtgctaagtctctctccagtagtgtgcgaatccatgctcaagtcggtcgctctgctttgcagacatcgaaaaggccatccgggtacctccgcctcctctcctttctgtccaccctatgcgtccgctcttcgaagcatgcaagctccttatccagacacacgcacggcgactaccactcattgacacggacgatcagacgggcaaggaggtggtgctcagtgtattgacccagtatagggtgttgaaatttatggctgtcaacgtgagcataccacgcctgggcgtcgatgtgaatgagaagtgtactgatctaagatgaggcaattcctatcagtgccgcgagacgattcacctcgaccaaacacttcggtcgctcaacattgggacgtactgcaatccctcaccggaacacgataatccctactaccctatcgctaccgcgaccatgcagacggccgttttcgacgtggtacacatgttttcagagttgggaatctcggcggttccgatcgtcgacgcgaatggaaaggtgatcaatttgtacgagaccgttgatgtcatcgtgagttttccggtaacaggtgccagctaaatcgaaagtgctgatcctgatgatgttacctcagacgttgctcaagctgggcacataccaagcacttgacctgacgatagctcaggccttggcacgccggccggtagattttgaaggcgtcctcacatgtggccccgagagctcgttggcttcggtctttgctctcattcggatgcgacggatacatcgactcgtggttatcgatgacggtcaaccgaaagacggcgaatcggagcaggatgcgaaggaacgaaagggtcggcttttgggcttgatctcgttgagtgacgttttgcgacatgtcatcgtgagtcaggataccttaatgaagctttagccaagcgacgtgtgctaatcatcctttgtctcggtagggatcggatgtggaaattggtggaggtggagtcggagctgtaccggtcgagacgcttctggcaggtggcacagcacagggcaaggctcctcgagcggatagagcagcggctcaagctgccattcgacgggacgccgagttgaggggagagattcccacatgaccaagagcaggtcgggcgtagcatgagcgcacacggacgcgagattagagtacgagctggagcgatcaggacgtgaagaatccgctggccgctactttccatagatgcgagagatgcagttctaatgactcgttagcaatcccacttcttgggcgattttgtttatggcatatctattcgttgtaaagcaccatctgtgaacttggttaggtcacgtgaatcccccaacgcggacatccggctcaccctgctcagtgatcggcagagttcccgacgatacaacctgcgttacaccagcgttgatctgatcgattccttacatcacggcctagctcgttgtatctgcaatcttgatcaagggatcttctgttcatttttcacagtctgcaaaccggtggacaagatggcgactaagctggcacagaagagggtgagtccttcacaccctggtcggctgagccgcctcgtatccgagtatcttcggctttgtcccgagctcatccatgtcttctccggatcaacagctccagaaggagtttcaagcaatggagaaatctccccctccattcatctacgccagattcgaggagaagaacatcctagattgtgagttggtcgtctcgataagcgtgccaatctttaactgattgggaaacgaccgatcaaagggcactttatccttcgtggacctcctgattctccttacactggaggcgaatatcatggtgttatcaacgtcagttatactgcctattaatccgcttcctcaacgctgatgcttcatgttggcctctgtagtttcctagcgactacccgtgagcactaggttatctcttgaatccggtgacaaacagctgatctctcaacatcgtccaacagattcaaaccccctgacatcaagttcttcactccttccggacgcttcgcacccaaccagaagatttgcatgagcatgaccagctagtaagttgtttgtctgcgaagaacgccggttgactgaggctcatcatcagatcgctactatccgacgcagccacccgtctacgtgagatcggatctactgcttcgtcagacacgacgaaagagagtttcagtgctgaagtttttggtaccctacaggtggaatgccgcctggtccgttgctaccatcttgaccggactgctttctttcatgttggcagatgagtgagcgtgggaaggtgaaccaggtcctgttaatctggcactgaatgggtcgccctttatagaatcacaactggatctgtcaagacaaccgacgatgacaagagagcgctggccaaattgtctcacgctcacaacatccagaacaagaagtttcgagatttgttccccgaagtacgttggctgtccacggacacctaattgcaagcccgctcacatcgatcatttcggtagtactctggcccagagatgaaagacgtacccgacatgggacaggccgacaagccagccgcaatttcccccgtaaccagccagtcttcaagctccgaggcgagtggcatagctgatcctcggcagacaacaggagaagtgacgacaatgaacaacgcgacatcgaaattgagtggtgtggccgagacctcaggttcaacagcagtagcagcagcgaaagaccggggatggcaagttctaaatctgagatggtgggcgatagcggcttttgtagcgtttgttctttcacgactgtccaccttgggaagtgcctagacttgtctttctctacctcgtatgtctctgcagtcgtgtcgttgtacaagctcttatgcatgaatatgacccccaaaccaagcaatgaagcaccgggtctcgctcttagaaagcataccaaaatgaaacgttggtgggcatggctaaattcaggcgtaaaatcaatcggtaaattttgggtgggacgacgactccgagcgtcgtaccttgttgatgatctatgtcgtcactatcaccgtctgttggcgcacctcttgcttgcgctatgacgtctcaagaatgtttacctgaggtgagcgggcaatcggcttactcgtgattcgatgagcagtcgtgatctcacttgataggcgagcttctcggaaggagtcggttagagcctatgattcagcaaccttcatcattcactgggacatatttacgtgctgcagaacctgctcaccttgacctgcttgtcggatacacttgttacatctaggtggtcacgatccgatcgaaacaatccagcgagaccctccatccactctgtaaactcgtcccgggaaggtgctactagatctaggagactgtgaccatcactgctgattagcgaaaaggatacctgagaaggtatagtctgcgtgtattgcatgatggctctggaggtttgtgcgcggacttcaacaacgtcgctcagatccaggacttccggcaaccgctcggtaggagcgatccctttgcgctcatgatatccgccccagtgtattgttttcaaatcttcggactaccaagacctcgaatcagtaattgagccatggtgctatgctccgttacttgccagtttcacaaagcgccatacggctgggttgatgtcagaccgatccgcgatactggattgtaccaggttgacacccgtatggaaccaagttcctaccccgatcgtgtgtgtcaattagtatggccggatgaggtttagatgtttatggcttaccagaacacaggcaatccaatctgtatcgacatggctcttttgtcagctgacgcgatagacaaaaatcaaaactaatgtacagacctttgcgcttcgataaaattctggctttgatccttcaacatatccgataactcccttcgattccgactcagatccatgcgtcgctataatcatgcaactgactcacctcatcgaaccaggctgtaagtgttccgcgtgcaattcgagcgctctgatctgcctttccaggatggcatcgtaggatatctctagcagcttttcctccagtgtgtgccaagcgatccaagcatcttcttccagaacagacctcagatgaaagcttgtacagtcgaatacctgcttcatatcgtccggaaacgcctcagagacctgccagatcctgtgtttccggtcagactgcaacgctgttctataaagagatgatcacttacttgaaacataatctgattgtgagggtgtataaacggctgaaagcgagcagtgtcggctgaaattgtgtcgggcgctgttgaatcaagctagtgaagcaggacagcaacaagcgcgcgcactggtggctaatcatgtgttgggaggtaaggacttggcttgaacacgaaaacatggtggatctcacctggccaacaatagtggaggacgccgttctccgtcgatgtctgcgaatgcctcgaggatctgtgatgggacaatcaaatacacataatctcatgcttatcgttccgccgacctactttaaaatacttaaaatactctggtgaactgcttgcagaagacgcctgatgtatgatttgtcgacgtcaggccgaggacgatacttactggcgcttgacctcaccagtaaatcaacggccaataaccctatactgtcgaacgactcctgacgtaggttcaccaagtatccctggctgaggctctccctactggtaacctgccggtctgccggacccgctactggctctccggattcttcagacttggtggcgatgatgtctagcaaggcctgatgagaagcgtcttgtacgacgaaaggtttccgctgctttagctgcaggtagtgcaagtatagcctttgaaagtcgagcatgtgtcgtttgatgtctgtatgttcgtaaatacccatggcgcgctagcacagagtagataaggctgtagtccgatgatcaatgcagtcggccgatgacactgactttgacgatatcattgactttgaccgcttcgagttcggtcaacaactcccactccacttctacgaacacggcggcgccaaagatgctgttgacaagctcgaggctaaatgtcgaatgaacggatcgtgagccgatagaaagggatacgcgtgcacataggaccgaccttgcagatgccatttccacgtcactgatatcgatgcgttttgctatggcgagcagaaagccaggcgtttgttgaatggctgggaaaaggggaccgattcccatttgcctaggatcgtcgtggtttgcatttgctctagcttttcccttgccggacagatcatccagttttaatttctccccgaccctcccgacaagttgagagagagcttctgtggctgggcgacagatgttatgtgtctttgccgtggtcacgatgtggacgagctataaaatacgcttgaaggtcaatcctccccattcacgcactgtggctggggcatacttacacgctgtatacactggtgaccgatgatctcccagcctacatggagatctaagacagccgagaaactctgcagagcgtactgtattcgtcgggcttttagcggtcgatctgatgcaagcatcgataccaagctcactgccaacatgttcccggtaagaggtgaagcgcgctgttccgatgtagatcccgtgtaaggctcgggcctatcggtatccgtgggttccacttggtcttcatctgttatagagagtaacttgaccagcagctgcattcctcctttcagcataaactcgtgactgaattcctcttccttgatatatttctgcagcttgaatagcgatagcttcaatggtggttgaatctgcttggatggcgaagtcgggatcggggaaagaggttgcaaagcataggacaaggcagatatggtatccaaggcttcaagcgatggcgaggcaacgactctatgtgaattgggacacactctgagtgggtgctagtgtgtgtggtctgagggatggatttgattgaactcacttcagatcgtctccctccatcaccttcatcgttaggttctcatctgtaacaaggacatcgttcatatcccgtatcgctagcgttgctgcaggttcttctgtcttgaaagcagccgacagctgtttgatgacctgtctcacaggctgcgaggcgggcagatcaacaatctccatagaaacagattgattcgaagggtctgggctcactagctgaggatcgattctagccttcaagactcgatctaacgcaagcagtcgatcggttcaactttttggtcttcgatggtgttacccattcgtcattgatccttgcccttaccgctgtaccggacggcgttgctagcctgcaacttcggcgtggacatcctcgtggacatcctcgtggatatcacaatcgagtattctagtccgatcggcctatcgttatggttcgagatgggtcaaatctccagctacaagaggagaatctgctcagaggatattagagagggtgagttgaaaggaaagtctgatgagatgatcatcagatcagagccggcatagagcgtgcggagggggcgtccttctttgttcccagatcaaaccggaagttattgtggttccgccttcgacatcgtcaacatcaaggtggatttaagagcatgtttgtcacttgatgacttatcatggtggaaatagaagagatcgcggaccccagctgacgtcaaggcgaaagagcatgcgaatgctcaaagacgggttctcacaaagttgcctgggcggacgctcgatgctcatatgtctggacgactccaacgcatcgccatcatatcataataccattgcttcgataccctatcaggaagcctcaacaacctgcgctcagtgaaactttcttataatgtcatcaacctacaaccaccctcagcccgtcgacctcggcggcaatgtcatgaccgatgcttcagccacgactatcaagcccaccgaaggagctcctcaaggtgaggcgggatctcctgcttgatcgtctagtaaagctcactatggcgatacgttcctgtttacatctcgatagatgcaactcatgccccaatgacggtgatcgtggatcctaacgcgaagcccgaaaagatgcccttcaaagaacaggtgggagttcatctgtctcgttcccctgtatgttcgcatttgctgacagactcatatacggctgtcaatagatgaggggatacgccaagatttacgctggcaaggctttcaggaacatggacgaggtcgctctcggtgaggcacaattggccgaccagctgcctgacaggaagctttagtacatctccaacactgtgctcgtccgatcgaggaccttccaaccgtactgaatcttcgtaatgtatccttaattcaaccctgtatcatccctcggtgtggaatttgtgatcgattgattatggaatgatattctacaatggggactttggcgattgctacaagatgggcgttgttgatacagtaatccgttccagacgaaagatctcgtatctagatctccatgcaagagagacgtgcgagtttatcgttaagtggctcgctaacgaagaaaacaacctcaaatcagttgcgatggtctgcgtacggagtgcggctagcggcgagctcgggactcacatggtagaaagtcgagatgaggacagagactgtctagcgacgcttgagggtcgcttccagtgatccgatggatgatccaacggatgagatggacgagaaagactctgcccgttcgaagctaatcaatcgatcggagagaaagtggcgatgccagtcagccccggtgatctgagtcgagaattcggcccagcctcgttcttcactcactcgatccccgtccgggctgtcatccagagagccttggtgtagtcaaagagagactcggaatatcgccgtttggcgaccaagacgtctctggtatcatctgtgtctcgccaaagatcagcagtggctcatctttcgatgcaatcgtcgttcgacataccgccctcgtcctcaggaggatgcaaatcgttgacgtcgaggtcaaagtaacccggtgtggctgggtgtgaaactcgttcgtaactcatgtttcgtccttgaagggtatttcgtctgcggattctgggtattgtaatcgtgggtgatcgggattttatggctgaatccaggctatcagacgacctgaatatgaatagctgattgccgtacgatatgcgtgaaattgggaagactcggagagatacagctagtcttgaatcgtacagtctacagcatctgagctcccactcatcagacagttatatctatatacgccaggctagctgctagctaccactggccactggccggatgtgattgtgagatcggtcaacatcccaaggtcgtttccaagctagaactcggctcccccagatgtaagccaaaacgagctctacgcaagcccctcgtggcagtcaccccatggaagggtctcactttttgatcgcgctagtcagcagaatctgcatcatcttctcttggctcctataaggctcagccgattttgatcgcgtccgttaggcccgatttgctgacacctggatcagctggaatcgtggctctatccacctttggcctagtgcttgaaaagtgttaacctttgatcctctttgcattcgcattctccggacagtattttacacgtattgcccgcggacaaggctcctcatcatggtttggctccagctatctgtccacagttaagacgctgtaatggggagcgatgtgacgtcggaaaagcctttcttctatccttccgccgcctaatagtccttctttctcggtttcagcatcgccgatcatcgatagcagcataggtggcgtttcccccccgcgtgccgccgaaaaatgacgtcgtcaaccgagaacagatcgccgatgacgccgagccgtaatctatgcgttttggtttggtatatgcgttctcgatcctgatcccggaagcttccagctcatcggaagcgaatgacgacattgtcgaatctgatccgacccgttccgagctataagcagctgacgaccaaagtcgacaaccacatcttacgcccttgtttccatctgcagtaattcttacttatttcctcaactcttcttactctacctcacaaagtttccagttagctctatataatcagtgatgtctgactacccgaccgcatccacctcggctttgatcgatgtcctccagcaccgagcgacatcgcccttttccatctcgctcggactcggtttcgcggcgtcatcctacttcttcttcaccaatgtcgataccctgaccttcagccctgtcgctctcgtcggtagcgccaaggagaggaggaaggtcggattggaaggaaaccagggacaggctgtcgagctctgggagtggtacatgaagaaggctgtcgtgagttgaccgaagcgttgccccattagaacatgacctgatcatcttttttttgacgcgctctctagcctaccactggcgcatcgctggccatcggttctttgggactcgctgccgccggtttcctcatccccgtctcttcgttctcgacctaccctcgtgacctccgtcgaatcctcttcggtgccgtcgtcctccttacctcgactgttccctactcgctgttctctagtaagccttgacgcgagacgaagaatagacgaatgggtcgctgactgtgccggtcgatcttaccatccaccagtcacccctctcaacaagaccttgctcgaccttagccagaagtctgccgccgctcgagccaaccctctctacccggactcgaaatctggcagctcctctgaactctacagccaagaatcccgcggattgcttccccaggaagaggctcaggcccgtatgatcctggaaaagtggatcaaggcgcacaccggccgagtcgtcctcgccgctgccggatgggccttggcattgggcggagtcatgctcgcctactagacgcgcgtgtttgagttatagtagacgagagatgatcgccttgattaattgatgtaccgataacgcattcggaccgagtataccagaaaccaagatccagagtcgaacaacgagcgagaaacatgtgtctggccaatttgaacggacgacacggtcgtactggtcgcgtttcgcctgataggtgattttgcgcagaaccaaccttcttgttcaatgtcgcggtcaccattcccctaacttcaccctggtcctctttgccaaacctcgtaaaatctgtattagagttttacacctgtttttgcgccatgggatcggataagggtctatatgtgacacattcgcgcgatcgttgtctgggaggctcctcgggttacgggtaccgactgtggctcgacaagtcctcgtaaatctcgatagatcgttgatcggcatgaatctcggtcatggtcgatcggaagcgttacatgttcaaaacgaactgtcgattccgtggctcgtagagtctcgagcgttccctgtcgatgtctctaagcgattcggcgtgggaggattatcccagctttcgattttcctgggcacggtgatccgtcggagagaacaagcgtgtcacgtcgtatcctcgactctgaagcgacactagggctggaattgggatcgtccgtgttcatcgccctcgatacaatttctagtgccaagctgggagctcaagaagggtgtcgttacagtgtgtatctcgtcgagtaaggccagattccttgcagaacatccgttgatgagacgaggcgaatcggtatcgtccacgaatctcagttggtggcgccttgaatttgggagaggagttccttggccttggtgtactctgtcgtcgagacgatttcttcctcctcggccgtagcgtcctgtggatgtcgagcaggtcccgtcagatcagttcgatgcccgcccgatcgatggcccagccgaaccggattggactcaccaccaacgccgagagatcctcgtatgcctccttgacccgatcttgcgaaggagagatcatctgctcgcaatccttcaacactttacgctgatccggtagtgtagcgagcatctcgggtcaatcccgacgatcgaaggggacgtgacgggacgcttcaggtgaaagaggggggacgtaccgcgttcttcagatcccattcgtcagcgtcccccttggataatcgctcgacgacttgttcctgctcggtgtattcctttttgtacaggtcgacctcttttgagaggctgtcaggcgagacgagacgagatgattaacaagagtttgtttacgatttgagcgaaagggctcgatcgaggtcgaaggcgtcagcgacttgccgttggagggaccctgtcttgatcgtcaattgacgggtggtctgtttgatagaatccgacatgattcgtcgagtctatctagagttatagtgtgttaatgactgatatgagtgtcggtccatgtctgatcgactgaccccagggtgtggtatggttgtttgaacatctaacccggggatgtccccccccttgccacatcttttgacgcgcgcgcgtgattgagtgagtttacaactttcctctgtcgcgtgagaaagcgaaagcgacagaggtaccgaggtgtgggtctcctcattcttggtggtcgcaactatcatcgtctacacaacaggctacgacagctattcatctatcgaatatagacaaaggctctccctacgatacggtcatcaacgatagctcaagacctttccccccaaaaaaaagcctatacaaaaatggcagatgaatacggtgcgttgatccttcgctctcacgttcgctcgagaccgcgacgcttcagctcactcttttttctgttattatgcctcgtatatcacagatgccctcgaggccgctgcctcctctttcgctgctacggccgaagtatccaaaagtggtcagtcaacactgaatattccttaccctgccgcgagctgatcgacccgacctttgtgtgccgcgccagaacaccgttcttcgaggacccgcgagtattcccccggacatcgaagtagtagggacgaccgtgatagacggggaggagatcgagaccggcctcgtgaacgggacgatcgggaacgtgacagggacaggggcgactatgatcgcagggaccgacgagattacgaccgggagagggagaggagacaccgtgaacgtgccgatggtggggatagggacagggagagaggttacgatcgggatcacaggagacgggacgaccggggaggagatcgataccccggtcgaggcggtcccgatgggtacgacggacgccgggctggaagccctcccggtggcatgatcgcttcgagcatgagggacgatcgcggtccacctggaggtggtcgtggggactttggcggcggcggcggcaggggcgatcacaacggcggcggtggttacggacacggagggtacagggatgatcgagagagggttgacgatgaggcaagggggggattggactgggtgcgtcggttaccctggctctcgctggtcgctgactgactgctcagtggccccctcgtgtgtgtgtgcgcgcgcttcaaagtcgacccaattctatcgccgactagcaaatctgcgcttcaaagcagaagagcgggaaaaggggggggggaagagtcgcgcgtcgagtgggaattggatccgccccagagaggcgacgcgaatcgatcaacacgagagagcatgacgatgacgtgatcaagttccatgaccaccacggacatctacgaacgttcatcatctccgtctggtcagtcgatttgattccgaattttggttccatctctctctcgtcatcgtggatcgtgatgaatgggtgattgcgtgattgcgcgcgacccttcgatccgaataaaaccagggccacgatttgatcgattagcttccgcccacgttcccccgcccctcccctgcccttgtgcgatgacgatcgaccctgttcgacggacccgaaagttcgcaaagtcacagacaggcagacagagagacgacaacctgcaaccaaccgacatcgcccacttccactgatcatatcgattccgaatcccactgctatcgagatcgttaccacactctcctcgttcaaaagacgacactgttcatctaaaacgacgtctaccgagtcataacatcgtccgtccatcgatcatccgaccgagattgccactcaattcgtacaaaagaacagacaagtcggctcgacatcaaaaaaccacacatcgcaccgaaacccgaaacccacccaccaccgctcaacacaaatctcgagagaacgaaaacagacagacatcgatctctgcctcatccaccaaccatgtctcgaccgatcgccaacaacgtccgtagggaatccgtctcggcctcgaaccctccttcttcgtgagtccgacgtcgcggtccccaaaccgggatcatcgactcggcgtgattgtcgtgttttcctgatcaacttgctgattctcatcattcaccccgtttctctgctgtcctgtacgacccacgacgttcatcatgcaatagtatccccatccctatgaacaccaaaggcttcgagaggagcatggtcgcgacaagtcctcgtcaggatggaggataccttgggacgagccctactgctggtttcagcgtgagtccctttcgttgcgtcatcctacgacgacaataccgagctcatcctccccgctccgaccccacagctctcgaacaacatgaacctctcgacttcgccccgtgccggtcgatcgggtggacctgcgtccgcggccgctcgtctcctacacgctttcctccctagcaacatcaacatcccttcgtccaccacctcgacggcgaccgagggcgaaaagaccggtcagatcaggatcttgctcctggagaacatttcgcaggacgcggcccagtacctcagggatcaggggtatcacgtcgatctcatctccaaagcatacggagaggacgagttgatagagaggttgagcgggtatcaggcgttggggatcaggagcaagacaaaggtcacggaaagggtcatcaagtcggctcctcaggtgagtaggggcaggcagtagtcgcacaccccgttgcccctcggcgcgctgacattcggtcgctttcgctccccctcgcccgcctgcagctcttgacgatcggatgtttctgcatcgggaccaaccaggtcgacctcgaggccgccgcaaaggccgggatcgccgtcttcaactctccctttgccaactcgcgttccgtcgccgaactcgtcatcagcgagatcatcgccctctcgcgtcaactcggtgacaggtcccgcgagatgcgcgaagggatctggaacaaggtctccaagggctgttgggagatccggggcaagacgttggggatcgtcgggtatggacatatcggtagtcagttgagcgtcttggcggaagcctttgggatgcaagtcatctactacgacgtcttgcccatcatgcccctcggatcggccaggcagaccgatacgctcgaacagctcttgggcgccgcggatttcgtcaccctgcacgtccccgagttggaagagacgaggaacatgatcggggccaccgaattgggtcagatgaaacagggagcttacttgatcaacaactcgaggggaaaagtcgtccacctccccgcactcgtcgacgccctcgaatcgggtcacttggccggatgcgccgtcgacgtcttcccgtcggaacccggctcgaacggaccagggttcaacgataacctcggagatttcatccccaggttgaggaaatgccccaacacgatcttgaccccgcatatcggaggatcgaccgaagaggctcaacgggccatcggacaagaggtcgctagcgctttgacgaggtacctcaactttggaacgtcggtcggagccgtcaacttccccgaggtcgatctcagggccatcaccacggccgacgagaggcacatcagggtgtgccacttgcacaccaacgctcccggaggtacgtcctctcggcgaacctcgcgcggaccatcccacgttgtgccgcatttactaattagatcgacatgccttgtgcgattcgcagtactcaagggtctcaacaagattctcggcaactttaacattaccaaacagtttaccgactcgagaggtgatatcgcctacctgctcgccgacgtctcggacgtctcgctcgatcagatcagggacatttactcggaaatttcggacatgccgaccaacatcaagacgaggttgctctgtgagtcgcctgccacgaacgtccggttgaggtgatgggccgagctcatccatcgacctcgcatttgcagactagactagccccggtttttttttcgcttcaacacaccatgtatcaccttgcctgttaccaccaccgccacaaccacaacaacaaccacaacgaagacggatagcgtctcgactgcttcgactgctcaacggcagggcttttggttcatccgaatgcacgtacgtatatatagatagacacgtaatcatatcacatcgaacgaatccatgagatacttggaatgggcagcccggcgggacacgtccctctctgtcgaccgtatgccgacttgactgtgttcatgtcgaaaatgaacacagtatgtagcatggcctggcgtgcaagcctcgtcaacagatctcgaacgatatgagatcgtgccggcgcaagacgagcgcgctcgtacagccggagagcgttgcttctcgttaggctgtcgtgcaagttgataggtgacttgtcgtggtccagggggttgtgagattttccagaacatcaggctcggtttgcgatgcaggcgtatcatccggctatgggagcaatagacattgagacgttagacagtcgcgtctacgatggcatcactgcatagcaatgactggccgcctctgttacactgatacgcaattataggctacagttctctcagttggatatattctagcctgttgcaactggggctccgccgacgagctcattgatagacgactggctggcaggctccttcctgtcaggatagttgtcaccttccgcagattttctcttcctgtcccgttgtccctctcgtgttccgttgttccctttcggtccctcacgacctggccgctgggtcggcttgacaggtcgaggcaggacgacctccggctcgtccacgacgataacttcgatccccgaacctagactctccctagccttctgggccaaccatttgatagcccagacttcactccggttgtgaccgacaaagatcgtagatattcggagcgagcgcgccgtctcggatccgagtggacggggttccccggtgatgtaaaagatcgaggacgggtctactggatctcgagggcgtgatggatgtaaaggggtatcatgcgggttctccagggatgccaaaggttcagatagggtatgtaggagacgatcgataatgattggctcaaaggcgttcatgcaggcaatgtatttcggtctaaccgagtccttctcctgcgtagactcctgggcggcattagctgtggcttcagctgggatagacaggtcggcgaaattgtcaccctccaacccgtcgacctctcgtgacaagacgtctttccactctcctgtcgttctagccgaaagagcctcaggtattttgacgacgacgcccatcttcctctcagggtcgcccttgtacccgatgatctctccattaccaggtacaacatccgttccgatggcgctcattaaagctaggttgtaccccgtcgtcaagatctcgtccagacgttgatgactcgtcaacactaaattgctcgggaagagccgtcgacgttcgagagcccatggtcggtgcaggaagactgcggtgcggggagtcaactgagagtagacgctcgcggtaggagtgacggagaggatgagtcggttgatgggggctgatgagcgtcttggcgtgtgatacagtatcgggaggtgatgaggagctggaggtagaaggtcggtaaacaggtcgacgatttccgggtacgatcggtgcgaccagatcggaggaggtggaggtggtcttggtggtctcgaacgagaaacaaccggtttcgcgacatctgtcgtcagagattcggacatggcggccacgtaatggaggaatcgacggactagcttgcttgacatccgagagctcggaaggggcaggctacgaggtgccgagctctcgcagatgacaggctaaaagctggacgttctttccgttgcatgctgcatgttggatgctggatcggtcgatcgtgatcgtgggatcatcttaccaaagtcacgtgaccctcaactccctctgcattacggcatgttcatcgtcataaaaaatagtgtgctctcgctcgagctgtccattcacgattgatagaacttgaccacccgtccgttcggaaaagacattagattcagaggtcaatatcttgggcaggtttagccgcaaactatcaccgatttgcaggacaattcggtccacactcctagtcaagttgtctatcgatcgctgattgcttggcagtgtgttcccggggatcgatttttcctctttcctgaaacgacttctgaacagttgcacagtctccaacagaatagcgagtcgcttcgcaagaacgggagcgttgttcgagcatgcaagcatcagctacctcgtctagtacgcgtcttgacacgagtgactgcgtcgaccttgacgatggaagacgaaacacacgccgaccttgagattgatgaccatcccgcgagtcggttttatggtttgcgctaaaacaccgacgaccagcaacgagcgatgggacaggccgattaggtggccctgcccgccgaccgggtactcgaattcgattcgtttgatacgattcactctatcctcgcgagcggcgtaccccccgtttccgctccacgcggcacggaagcatcgaccggggatgaccgaagcgtttcatcaaactcgtgtggcgtcgaccgtttctttttgttcttttccccctgtcgtagcctgctggctaggaaactgatgtgatccaccgcttggttcagcagacaagatcacacggtacggtctggatcgaaaggaaggcaacagcccgcatcgagcttgactccacgctcgatccttcccccatgggtctttcccgcgcggaacaggggacgttgatggatgatgacccactcgacatattttccacgacgagtcctttgaatcaccactcatgccactcaatctatccagacgaacattcgccatccattcacgtccatccgatctcgatacttcgttcgagaagggtcttactcgaggtaccccagacggaagacgtatcgcctggatactcgacgacgacatcggcacatccatccactcatcagccaagccccagctcatcttgctcatttaccgtggcatcaatccacgccgccaatctaaaacttttccacgcccgagagagttcaatcaagggtcagagtgataaaatacagctggggggtctttaagcagggggaaaacgtatataggtaggtgataagtgactggcggtgccatccgatgaaccgttagatactgcctaccttgagaatcaccaactcgtattgacatatcttcccattcgacctcttgtactctttttctcgtcatcaaccgtctcttcttccccggacgaccacgaaccggacccaatgggcatcaaagacaaggtcagaaactcactcacgggtcccatctccaccatgcagaacaacaacccacaggccgataccaactactttgtccagctggataccaaatacgactatccgaactcgccagagaacggacatatggaggcttatgatgccaagggacccgacttttcgtacccggccgagtatggagtcggtcaggtgccctacgggggcggagcgggggaggatatgcaattcgggggttcctatgggatgcaagggatgggacaaggaggaggaggagccgcgaacgaagagtttgaagagtatttgcagttgatggtcttgttccggtaggtcgaatgcatttataacggaggtcttcgtatactgacgagaccggtgtggggttttcttcagagagaaggattggaacgtcacgctgagaaagatcgacgtaagttaggctcgggatacgatgtgctcgtttactaagctcgtgtccacgctacctcagtggagactcttgccaccttacctcttcgcgtatctgttggccttcatggtaagcaatcattgaccaggatcgacgaccggcgactaacattttcgtcatcggtaggatcgaggaaacgtcggaaacgcgaaagtcgcgggattattgaagaccatcaacatgactgatgcgcagtacaattccggagtcgtcagtcctccgtatcacagaagcaaataccgcttgccactcggctgacttgatggtgccttgacgcaggcggccttctttgtcctctatatcttgttggaagtcccctcgcaattcgccttgagatacatcggtcctcgatactacctgtcagctctacttactggatgcggtatcggtaggtccaatcacgttgacaggacgatgggatatggctgatctacaatcaccgactgtagttatggcaagtggagcagctatccaaagcgctaccggtttcgtctgcatgcgtctggctctcggtgccaccgagtcgggtctcatgccggttggtcaaaacgacaagcattacgctatcgagcgctaattttttatttcacagggtttcaatgcatccatcgctcaatactatactcgagaagagcttagtacgcgtatcgcgatctttttcgcctccgcaagtatttcaggaggcgagtcgcaacatcgctctatcgatctcaggacgtcaccattgtgaagagtcgcttaccgcctcccatttgccccatccgcagccttctctggtgctctcgcatttgctctctcgcatctcggaggcaccgccggtctagaatcctggcgctggatttggcttctagaaggggctttcactgcgttcatcggactcatttgccctttccttttcgttgacattccggaaagggccggaaattggttgacgcacgaagagaaacggtacctggtactccggcagcgatatggaccgggatcagggggtgtcgctagatctgaagttctcaactttggtctagttgtggatctgctcaagaattggcagacctggccgatgatcctcatttacttcagtcatagtgtgctagggcaagtagtgcagcgccaaatcctctcgcttggtgaatattgactgactcagccgggatccttgttcaaacagatatgctatcaacttcagtcttcctcctttgatgaagactctgggatactccaacgcagaatcttacctcattcctgtgcccatctttatcgccgcctgcgctttcacgatcgccaactcctggtggagtgatcgacgcgagagtcggtaagccgcggtatggaatacgtcaagagttctcttttaaacctgacttcttgctaccttctagattcttgcacatcttggtgccgttctcactggcagttgttggagttgcaatgaccatccccacagccggaaagaaggatcttgtcggtttgagcattctcgggttgatgtaagccattgctgaacgggttctcatgcgctcacgaccatctgatggcggattactcagctgtctaaccctgtcggcatatggtgctgtgcccacgtccatctcctggatggcagccaacacggttgaaccgcatcgttcgatcgccatcgccttgcaggtccgttcgaaccctaacgatcctttatacttgcagctgacgcatatccctgtgaataaacagatcgcgacaggtggtctcggtggattgtgtggaagtttcctctaccttgatagcgaggctccgcaatatcctaccggttactacacttcgatggccgtcgcattcgtcggaatcgcatcatgtgtcgtgctcaagattggttatacgcgcgtcaaccgaaagcgaaacgagcttacgcgagaggagattgaaagcaactggaacgaggagaagctgtaagtcgggtctcacgataggcaattctgggcaatgtccactgagcaaagtggtagctctcgcagtgccgttgcaggtgacagatcgccgcatttcagatacctcatttaaagaggatgcgctcggcatcagcgtcggtaccaaataagcgacgcttaccatgattataggccagcaatcaggatattcctgatgggatgctgtaaatagagttatagggaccaagcgaggtgcacttgcaggcgtatcccttatgatgacgagcattaaactgttcttcttaaggcagcttctcgagaaccttgacagcgagctactgctaccattctcggactcgaattaagtgactggaatgagtcgtcctattcgctcagtgtcaatgtgaatgatggttactggatggatgtctatacgtctcgctcgtctcattacagatgtaggctagcccgatgtttacttccctaggccttggtagccatctgaacgatctcgggccagttctgtttggtcgtcccggcggggaaaggcaaccctgcgaccccactcttctccagccattccccctcctgctttccctttctcaccgccttcatcccggcccatcggacctttttcttgctatcgttgatctcgacgtatgcatcgtcgaagccgggaatgcaacccttgacgaagatcaggttgagggcggtatcgacgcggacgacgggcaggttctgcacggtcgttcgggtcgtacccatatgacccgccatcttctttccagggatgactcgaccggggtcctgaaggcaggaaggtggtcaggatcagctgtggtgcggaatgaagacgaaagcatgcgtagattggaggctcacctggtgttgacccgtactacccgcacttcgatgcgtcaatgacacaccgtgcgtcgccttcaatccgtggaacccgtgtcgcttcatcgcaccagcgaatccctttccgatactacatcatgaccgaaaacaaaacacgatcagacaaggctccctgccgtccggttcgaggccaccccgaaagctcggacttacgaatcacccgaaacgtcgacgtgttgtccgggaacaaagtgtgctgcactcagggtcgtcccgatgggcaagacggcgtcctctgtcactcggaattcgacaattttccgcttgggggctacttgggcttttgcgaattgtccacggaactgagaggataagcgtttcggtcgagggtgattggtcgtgccgagctggagggcgtgtaggaggggtttcgaggagaaggcggcgggttgaccaggtttaggtaccgctggggggttatgagctacaacttgcaagtcttccagctgagcgtacagacgggagcctccgtcagtaccgtcatcgagctgagaactggtaacaagagcctccggctcacctgcaagaccgtcacgggtacgcgaacacccttgtcatcccagatcgagctcattccgcgtttcctagcaaccagtccggtcctctgcgagtaaggagtccatgaaggagcctccgaggcagagtcggccggagtctctgatgaagtagcatatcctcgggccaagacgcttgagcagcccgcacagctcgggctcgaggccgccagcttcagtgtccggaaagaagcgatcaaggagttggaagtcatgatttctctatcgtgatggctggtgtattatgccggcgattgatagacaggctgtcgaaatgcaaggtgatgcagatgatcgatgatatgatgatgatgcatgatccctctcaaagtccagaaaagggttcggatccaaaatgaagcgcgatctcaagcgcgacacccggcccggcacttgcttgcactgacactcgaggtcgaatatgtatgtcaacgttggtggctgttgaacatacaacctcgaactcctcttcacacacgccaagattcatcttggacggcgaaacgctcttggacgaagctaccatatctcttcgcgattactctcggaccgattggcatctttggactcggcggcgtagcccagtgatccggaaacagagcctcgccacagagccgtatgtatgataaacttcatgatgatgacatcgttgttcaacccagactcaaaacaagatcgtattgtttgcgatatccagtcttgtggctcggtctcgtgaacttacagaaggataaacgacacctagacagcttgtcaaaacagcatcaagcgacacttgattgcgccgcctgtcatgtcggtctctggggtcaaacgacctcacgctgcttcgcctactccctctagcgtcagctttacaagcaaaaagaggcgctacgatggacctccccctgcagccctgaatactttggccaagcacctggcaggtcaggtcaaccaggtcgtcgaatggctcaaggttggtatactcatttccagcgtgacgattcctaagctctacggctttatggagctaaattcacttcctttgatgcccttaggccagaccggggccgcatcggctcgagaccatcgccaattctttccaagatacctatgcggatggaatccgactcatcttcaacccggaaatgatcaggctggtccagacgtataccggtgtaagctggaacgctcagcttgaattgctcgagtacaaggtatgtcgaccatgtcaggccagtgccgtctttagattaacccagtctgatacacggtccgcggtgtagaatgcgaacgccatgaagaccccggatgagctgttcaagcacattcaaaactattccgcccgacccggtgggatccccatcaactttatcaaacaaaattataccggcaatataccctgggtggacctgttgaagaaatgggaagacgacggcaagatcctcatcatgcgtttctcggccaaggcgacgatcccggaaccgggagccaagcctaaaaaggttgtacaggcaaagggggaggatgggtccaagacgatcatggaggcgggtctcaatacgtggaaggctgtcatgtatgatcaaggccgagcggacggcttggcacccaaaggtcaggtggacgaatgtatgtgcctggaaggttgacagtatggccggctagccgtgatctgatccgcggtcttggggctcgctctagcgttccgaacgatgtgggcatctatcgagactcccgagtcggccgacctcgagcgacttttgaccgagcgtaagtctactcgtcgatggattagttcacatcgcgtatcagcgtctcatctgtggtctggttgccttcagtgggtcacaaggtgaccccagctgaagctgcgaaaaagacggccaaccgtgcgcccaagaaggacggacggaaaaagagtcgcaagcaagatatccagaaattgacaaacgttcatatgatctccttggtgggtacttccgtgtgcgagatcaaagtcattgttcagcaagcttaccctttcctcatcgacccagggcgtcgatctctcgcaagattacatgcctgagtgatccagggcatgaattcaatcttacatccagttgtacagcatggcagaaatacatcatgtctccgggcctattccagccttgtccggcggtctggtcctgtatcgatacaagcattttctcgagtccgaatcgcaatttcgatgtaatacactgttcaatatcgatttctgagctcgagacaaatccacaagttgagagagaattctggcaggtaacaaaggactaagtggtgcaattttgtgaaggtaaccatgatgggaccaagggcatctgtcaaagatagccatcttggactattgcacctccacagactgtgtcaaaaggactgccgctcgagtgtcatctggagtgagacagggcattccgggcggagttcgccttcacaggcgcgttgtgatccttgaatcaacttcgtgacttgaagtgattcaccgtaaatgcttagacgtacgccaacgatgataactatgcagaggatatatatataaaaggtcgttacagatcgtcatcggtcgttaaggtatgattcattcgtgtcggggtcttttggaggcacgattctccactgattctcgtgccgagccatgcggcaagagctgctttctcttcttttcgtattcggcctcaatcattttggcccctctcccgacagggctgtcgatgccgttgtatttgacagcgttgtcgaccatgaggatgatatccttgtcaatcgaggatagcggagcgagatttttcagtttggtcttgatcatggacaggtctcgagcttcttctcgtttgacactgttgatgggccttgtcgtcagttctcaatgccgacatgacccggttccttgagatcggctcacacgttaaagtagtcggggatacccatggcgacggggtccactggaagcggccacacggctcgtcagctgtttcttccaattacacagcgtcagacgaagcgcatacctgggtactggaaccacttcccttccacggtcttcagggtgcttgtgagccactgatctatgaattttctttcttctgcagtaatggcgtccgtttgcatcaatttgggccatgttttcagtaactgcgactccattggaccggcgtatacgtcttcgattccgaggacaaagccgttgtactttcggcaactgtaatggcagatcgcttagaggccgctcatcggcacgcatcgcgatcaaattggctcacttccagatgatctgctccagatcggcggcgaactctcccagcgtctggtattcacttcgagcgaccttttcctccatcaaagcgagccacattggtctcttgatctcggcaaagtaactgcaaataggatcgaggcgtaaactgagccagtccgcatgtgccgttctcaaaaagacaccgataccgactttggagcgatcatctcgtcaggtttcggatagaactggcaatcacaaatcttcggctcagcatatgcaattcgggttgcgatgacatcgtggcttaccagtaagcgatacctgtcaacaagatcgcgaagtaatcgtaatgcccgaacgcgcttgaatggagtgcgatcctgagtccagcccttttcggtgaggcgttgtgcattcacaggagttggggcagcagtaagattcgggattacagccggtgttacggtttccgctgaggccataggcgagggcctgcgttcgtatcgctctgtgtctggctccaacttgcgtttcagcgtgatgacgggtttggaaatagtgacagttggaagtggcccgccatcgttgacttttggtttcgggggcaggacgggcggtggtttgctagagttgacgatcttgaccttcttctgcttggcagccgggggaggtgatgttgcgagcgcatcaagaatgtcatagttcacttcgcccgtttgcggcttgtgttgccgcttggtacctggtttcatcgcagacttcggcttgtctgcgataacgggcggagcataatccttcgttcggatgctcagtgatggtcgtgaggcgtcccctgcaactgttccgttcgcagtcagatcgacgctcggtatagaaggtcgtttgatattgaatttaagtgcggtgggtggcgccggcaacgactccggacctgtttgagctttcttcgatagagtcttttcgaccctggcccattctttgacatgcagggtgtgcaagtcagcgtcccggaaacaggagggactgaaataagtcggtatctgcttacgtccggtgaacaccttctcgaattctaccgccgcttcaaagacaggagacccttcgccgttgtatgccttgcaattcgcgacgataaggtccaagtcttctttgaactggtgccgattttcatactggccgtcagacaacttgtgcttgatagctgaaaggtcgattggtttcttgatgatcttgtagtagctgcgagaaccagcggatcagatgattgtcaaacgatatctagcgtgactccagagacataccccggcgcaaagttctcgtcgtccggcacggggtgacggaaaaagtcgctttgagggtgaacaagctgagcagtgaggaagaggtcaggatacgtctaggctgatcccagggacttgtcgtaccagtttttccaatgtgatattgacagctttgaagtcttcctccgacaaaccgctgcggtattgtctcccctttggcttccgcttttgcacctggctgattgtttcggggatgggaagcgcaggtgttgctttgactggcgggtcgcattcccaatccgtgagccattggggataagcttttgagcgggatgaactcaccgcttggcctggacttaattttgactccgcttcccaatttcaatatcaatctcgctgcagcgccctcccttcttcctgctgtcagcgtttcagccgcttgcaacagcgcgatgcgcgccgcgttgtccatgtcggaatcgctgatcatgatatgcagtatcagctaggaaatcgaagataactgcttcaaaacattcgacttacagaagttgcgacatcaggaagcgacctgtgtcaagtgatttgccgagcactcggcgccaagcgggtacgtcgtggtccatatcgacctgctctctgatctgtcgttccgactccgtctcaacatatcgactgctgggttgatgtagaccttcaacttctcccaaggcgagtgccatcaaccaggaatttgcaacaccctcagctacatgacgtcgaaaggatatagattgctccttcctcagcagctgtctgatatatttgtacagccagggaggcggtagctggcacgcaaggacgcagtccatagctagacgtcggacggcaggtagattgccaatccttttgggggctaatatcagaatcacaataacaaatggcagagcccattcccctcaccttgtgtatgtgaggaaatatggcagatgtactggcatgacttgcttatcagtaagggcgagagcgaatttggcctatggggtatattcaggtcagaagtctagattggatcagaaatcccgcacgtcagagctgacctgaataccagccatcgtaacgacattcccgtatgacggcaggaccttgtcaagcgccatcgcccggtcgatgcaagtcgtggtcctcttgaattctccggattgacgcagatggaaaggaactcgtttttgcaaggcagccagatttgagatcagggatgctagatagtacgattgagaaaactgttcgggtaaggtcttgcgtcagccactattggcaagacagattctgaccctgacgtacagtattctcttccaggtcacctagctcgatcattgaagagatctcatcacgcaaccacgcgctggtttctgtatctcgaggcgagttgaggtcccagggccaaatcgacaaagcacggacaacggcctgtcgaagagagttgatcagcgagccttcaaggaaaaattctccttggctactcacttgagataccatatagcgacccaattggccttgtagcggcggttgaagcttgtaagactccgttgtcgagtcgaaatcgcaatagcagcttcgaagtatcttggtgagatggtatatgccgagcttctctcccgtctcaagcggtgtcaacatctgcgcggtgcaacggggtaaacctcatgctcaagcaaataatggaaaccgtgtcttgctcactctaggcagcatttcaatggccaataccctaaccctataaaagcacgtatcgtccaaagcgatcttggtgagtgccgtcgcagccagcccgctcggcatcctggctagattcagtatagcctaaaaggaaaatagacataagcgggcgagcgggaggtgccaggaccagaagcacttacctctcgctgggcaaccacatcgcgatcatggtgtagctgctcggaccagtaatacggaagcatgatcggtgcgagtcctgacctgctcccagcgctgacttctgccaggacttcgatcgatgctagccattcgcattcgggatcatatcggatccagtcgaatccttgctccacaaatgtaatggcgtctggctcgtgccatcctgaaaatcgccattcttctacggtctttgcagcatcatgcagtccagcagacgcttgtgcagcgtcgtctgcagtctgcaacatgggaagccccttttcttgtcggtagtgtccgttcctcaggcgatgggctcgcctctggtgcgggttgaagaccagctcgtgagtcaaaccttcgtcaccgagctctatgacgtgttcgtatggcgcaatatccccctcgttgacccataaagttacctcgccctgtcgaatcaaggcttatcagtaacagtaaggaacgaagcatggtcgggtaagacgtaccgagaaatgcttcgtggggcatttccaatcgagattctgaggctccttctggttgaccgcattccaagcttggctagctccctgaaagacggagaccgtgatcgactgtccctttttgttgtactgcgctccaatgatgaattttggacaaccgcttccggtcacccattgttcttgaaacgcgctcaaatccatactcttgcttatcttgcgacatatcctgaaaaaattgtcggtggatagagcacggtcctggagcgtaccacctcgggcttgccgaaagatgtcagggatagcgttcctcgccaaaccggacgacgtggccaatcgtgccatacgcatgtcgagcatgtgcaagaccagcggggccttgagcgagatgaattgcatggtctcggcatctgggggtgagatcagtcccggtatatgtagcggaaagtgatctccctgatctaacgcaacgcaacggtccatgtctgaccgtagcctgaaccgatactcgttattccctagcaggtgtcgagtcaattgagcgttgatgtagagagccaacccggtggtgagccaaatgtccgaataggtcctcggaatcatgtggataccggaccattgggaagcgagtgcgtgtgtcagaataggccgcgtgatgaaggcctgctcgaccacttccggaggatatagcaattcttgcgagaacgtgcccatcgaagccgtgaccgaggattgcgtcgagggatcttcaacaaagaccatcttgaaggaggaataagggtagccgtcgtatccttccagaaagctcatggcttgccgcatacatgagacggtgttggccagctcgatttcgctccctggtaggcagtaggccaggagaagcggctgaacatcgctggtcgggtcgaggctgtcgagtagacgtcgagtctgatcttcttccggtataacgtgcaagtgaaaaggccctgcggcaaagctcatctgctgagccgaagtagggttactttgcacgaaataaaacagcgttttactgggatcgtcagggtggacgacctgacgaacaagatttcggtcagcatatgagacacagaagcgagagtgagacagacgtacttgttcctcgagctctgccgatgcaatcactcgtacgagctctccgtcctccgaactcccttctcctgctcccaactcagcctccatctcgtccggctcctgcctcagataccggggtacactaatctccagctcccacgggcatctgtcccagagattgtccagacagggtacccaatgtcgagcagcatcgtaagaggacgagttgatgaacatatgaggtatccgctgtaccaaatttgattagatggaccagtcagattctgtcgatgcacattgacgggacaatcgaacaaacttacaaagtcgttcccagcatcacccggtcgacgccatacgatgccttcggtgtccacatccgacatgcacacctcataatcgatggcgatgaggatttcggctagtccggcttgagctgcggggccaccgtccttcgtctgagcgatcctgacccaaccgtgagacacatcgatggccaattcgccctcgtccttctctgccatggccgcccacagttttcgcttgatctctggatgcctctggatagagtctggtagatttgggttgagaggcgttccatctcccaagtcttttaatccgagcagaggattatagtggctgaacgaggccggcaatgcaggaagaggatcatcgatgttgggcccggataggtgtaccgcagtgatccgtaagcatggggcagcatgcaggaataccgtcgaaagtcgaacatttgtcggcttgatggtgagataagctgtcgccttgacgctgcctgcaaagtcgagatcgagaacgaccctctggccgttcaacacgaatccacgattctcgcccgccatgatcgacgactgcgttcctcagaaccccgcgacagctttggtttactgtgtcgactagctccgagaagtcgctccgagatctatatcgctagtatgactctaccaatgtttgagccgtcgtttgagacgggggaggtttagttgcgagtatgatgaggttggtcgtcgtgaggatcccgtcacatggatgcatgcaactatcctggctgttcctggtggtggaggtcgaatacgcgagtcctagcttaccagcttgagagttcattcaagaaagggaaatcgacattttacttcgagatcgatctgagctactgccaagtatacgacaaacacagcgagctccaatcgggaatcggctcggctgctaacaaggcttccctaattgttgttctggaaacagttgcgtacgtgaagcctcaagcacacggcggttccggacgtcgggacacggcagaaagctacctcttgtctggaacatgtcgattacctttgcagcgatccaggccaacgcactggcgaggcaccgcaatatcccccaggtggatgtgaaggaaatgtccgacgaccgacccagagggacctttgaatccccgtttgtcatcgcggatgaaccgccaatcgctacgatacctgtactgagcgcccggcctcaacctcggcccagttcgagcaggcggcagagcaccccgcaagcgtcaaggtcaaatcggggtacagcgcctgcatcccaatcgaagaggaaacccgaggagaaaagaatcctgccagtgcgcatgagggggttaggtggatcaagcgggacaggctctaatgtgacggggaaagacgtcgaggacatgatataccagtgtttctctcgaacatgtgagagggcccagaatatgttcactccaccttttcctattgctgattacccgctaatttgatgcgcacagtaacttcttcgaagctgccgactgaagatctgcccatatgtctcaccgtcagcccatatgaagccgtttcctctaccctcaacaatcgcgcccaacctgaacccacctggtggacatctcctctgccggatcccgcgtcacttctcgtgtctccgtcggcaactcgcaagagcgtcgctctgccctctccgtcacctgtcaagaagagacggccgtctggacttgatatgggagaggtcgcgcccatgatcaatggacggaaacgagtcgtaatgcccgggttccgtaaggtgatcgaggaggacgacgtgatgcccaatgaaaagcgaaagacccgaggcgtgagtgaaggtcatttgacagcactattactgggcgagtagctaactctcatggttttaggctgcgacaacgacggagctcgaagactctagcgatgcccattatcagacgttacatttgcgctacgagcgatatgagtcacgagcgcgactggcggagcgacaaaagatggaacacgggcgatacaaactcagcatacggatagaatatctcgaaggtctgagcgatgacgtatgggaaggtgccgtcatgcgaatgatgcagcgaggcaaacgggtccgttctgttgaggagcccaaaggcgagggtcagggtcacgaccggaatcagaatcaacaggaaagcgatgcaaacgagaggcctgaagcgaagtcgctcgaagtcattcaagctgaagcagaggaacgagcatatatggccaccatggaagcaggagctgcactcctgaatattctcacgatacctggtttgaagcgggaattgattcgggaaggcaaggagctgttggcgagatatgaccgagtgctagcaaagtcagtctcaacgtccaggttctcccgtttctcacgcggcgatgtcgcaggctgacgagggcggtattttcgatcagacccaagcaagagaaaatacccgttccggtcccgctaccgtcgatgcatcgaagggtagaaaagcgggctcgaagccgagcttcgtcccgggaatccaccatgacacctccgcctcccgaaaccgaagaggaactggccattcgccgagccatggtgagtttgggtggttctgccgaatgcctcgtttacttgacatagctgagagatcgattgctacagatttcttctttacggaagcggtcgaacagtcctgagttgctggggagcgagaagcctccaagcaaacggcatcttccgatcccttcaaaagtcgagtccctcgacatgagcaaaacagtcgccactccctcaacccgctcaacccgaccgtcccgctcgactcgagccatacctacgacacctcttccgacccaatccggccctgctttcattccctatatcgagccttactacccgccaatgacagagtctggcaaaccagcgatcgtggaagcagccgacaaacggtacattgctttacaaaacgcggaaaaggcgaaagagctgctcgccaaacagaaagtagctgctggaggcaaagtcgcttctacaactgaatctaccaggagcgggaggcgaagcaggaccgatacgatgctgcccctcggcgtggcgccgcctcgaatgctagggtggaagatggacgtgagttggcgggctatctcgtgccccgactcccggcagtcgctgaatttttgaccctatcttgcccgtcctgcagttcgacctggatggcgatttctggcgaccattattgacggaacgcggttacggggacgccatcgatcctcccgatatgctccccgacgggcttgcgtcatacgccccactacctgaatcgctagatcacagcaaaccggatcccgtgcctgcctggatcgaccagatggctacagcgagagtcgatgaccaagataccaagctggggtctatggagatgccgatggacgtggatcagatgatggggagtgtgatcgacgtggacgttgatgtcgacgagactgtcgaggcagcggtagaagatgtaatctgatgatgaacacagatcattaacgatcgacgctatcgttattgagaaggatcgtcgattgagaaggatcgtcgattgagaaggatcgtcgattgagaaggatcgtcgattgagaaggatcgtcgattgagaaggatcgtcgattgagaaggatcgtcgatgcaagagcttgggaagattagaactcgtattcgtattgatatttgggttgtgtacaaaacaataatttgtcacatttccccccatccgacaaaaggtcagggatgggacaggttacaactcagaaaggactcccagacccatgtaagctcaaaagcccaagaggatcacgccgtgtcggtctgtgatctcaacaagccgacgacggctgcaagtgcacctcgaccacacctcctctcaacctgagaaccaagtgcagcgtgctctccttctgaatgttgtaatccgacaacgtcctcccgtcctccaattgctttccggcgaaaatcaaacgctgctggtcaggagggatcccttccttgtcctggatcttggacttgacattgtcgatggtgtccgaagactcgacctcgagggtgatggtcttcccggtcaaggtcttgacaaagatttgcatacctcccctcaatcggaggaccaaatggagggtggattccttctggatgtctgtaggtagaacgcggggtgaaaaacgcgatttttagtgagcgttgttgacgttgatgacgttgatgaagccgatgatgcgaccactcactgtagtcggacaaggtccttccatcttccaactgctttccagcgaaaatcaacctctgctgatcactacgagcgggaaccacattacgagtcagacgggggtgacaaggaattgattcgaaacgatgaacgtacggaggaattccctccttgtcctgaatcttggacttgacgttgtcgatggtgtcggacgattcgacctcgagggtgatggtctttccggtaagagtctactcgaattggacacgaggacgcgtcgagattagcaaagcgaacgtgggtgactgagatgcggggaatgatgggagcaggaactgaccttgacaaagatctgcatgatggtagagtgtggtgcgtgtgattggacttaagtctgtagcaatcgcgaaaggaaacgagtcaaggtaagcttttctgatgagaggcaaaggatatgggagtccagccgtgcttatatacgtgcagaacggaggcgaaaggaagcgtctagcaagtcgatcggaaaggaaggagatgacgagtcgaggattgataagcccaagagtggcaaacgcgatctcgaactgttcgagatccacaggcgaacgggccttgcgtctagctgatcgtctagatcttgtgcacagcgcacagctttgagtggtgttgtgatgatagatgtgatcgatccagacacgaatggtatggtggcgattcgtagtgatgtgatgacgaagccaggacgagacaagcggacggcggtacttacgagtcaactggttcaatttggccaagaggtcgttgtaaacggaaaagcagtaggagcgagtatgtcgattctgatcgacgaagtgtgttgatggtatatatacctaaagggggaaggcagggaagggtaagcaacgaggcgatgacacgatcacggtcacaaagagcagcagaggacacacaaatacggcagagtcagaccacggtcaaccccgtcaccggccctgctcccgcccccctcgccccgtgccgcgccttgacctttgcctcctttcggctaagcccgccaccgatctccggaagcagatcgatcaacgtctgataacaaatccggggcaacgacgcgtggcccggggttatgacgtttctcgaccgagggcgcctccaccttgttgtgaaaggcgggggtggcaaagtgaacggcagacaccatggttttaggtatgacatgctcgacaggtacagcaagagatgggaatcgatgaaagatcagggtagatcgagcacggagcttgtctagttgaacaatgatgatcacgaatccaaagcgtttactcaggaccgagatctcgggactagtaccagatctcgcaacactcctctgtcaatgtagtctcaaagtagcaccatgcgtttcaacacacatcagttgccacgtcgatcttcgaaacggccccgtcgatattattatgaggactctgaactcacgatttctgatcttcatatccttgtgatcctcgcacgtccccaacacagccccccttctctcccctttgtcttggccgtcctctttgtatgccggccagactccaggcaaagcgctgttttcgccaaacatagcgcaattctccttcacatgctcataccatgcgacccctggacagacccatcagtccgatcgtggcacttgttcatgcagtcgaagaagttgtcagtcttgacccctgaatacgcctaaatcctgttgaaggcccagtagccacgcgtgagatgatcgaaattgtgtaagctctacaactcgacgtggcaggggtgatatcataatcttacccccgcccaaagcggctgagccgaatagtaagccgcataggccctggtttctggggtctccttgctacctaaacacggcttggctcgagtagatgtcgctaccagtagcgggaacacggtgaacacagtgtagaggtacatcttgttgataacagtagtgtaatcgaacgcggtcgcttctagggacactaagagatgaagcgttcggaatattgccgcaggtatcgtggtatcaatgctcggcgggttacggatctttgatctatactcgtagtccgagggcgtcctttagtctagcctgaaacccggacctcacctaccttcttgcttaccccgggcagatgcctttgattcgtggatcgtctattgattctcatggtctatgaaaggtggctcacggagttcaagccccagctagccgacggcacaaggggacccggacttgcaacatctgatcctttcagattggtgacagcgatgcgaagaaaccttcagcagtccccgatccgtcgcggtacatctcaaaagaaggttttaggggaagaggggggctccggttccgggtagcaccacgttgaacttcgaagcaaagcatatccgaattcatttcaattcactagcgcgtagacgcggacagacagacaacttccgggccgccagtcgattctttcgattcgagtccagtcacaaacaattatcaacacccaccagccacgacgcctactcgagatggtcatacaaggtcctctcgaacttttggtatagatccatgaaagggttcgggttctgggcgaagatgttggtgaagcagacgccctagcaaacgagatgaaaagataggggtaacaaggcatattagtatcgattctccatcatcgccatcgagacccggcactgtccccgagggagacaaatgcatcccgagagcgcaaactcacagcgacgcctgtagtcggatccaaccagaactgcgtcttggccgctccatcccaacacccactcccagctttcctcccgtgggccgaatcccgcaggttcatacacagccctacactgtgaccaacgtccgactcggtgaacgagctgtcgtggtacgtttgacgctgcatcatcgagaggagacccgtcttggggacagaggatggcatggtatccgtaaagagctccttgaacgactcgcccgagatcaacccggtgttcgaggtgttcttgccggatcgcgatgggtcgcaagcgagcacggcgcggagaaaagagaggtagtccttggcggtcccgaagagccctgcacccccagcgtggactccgatcttgtcagggtcgccctctcgagcgtgaggtagcgacttgtagttgtcgggaaaggccttgatcgaaccagaaaccggatcgaggtaagtcacccgcatggatcgttcttgaacatccgacgaggggatgaaagaagtcgaggtcatcccacatcgggaaaagatgttgctcttgaaatattcctcgagcgtctgcgaagtcaaacgttgtacaaggatcccggcccaatcgatcccgatcgaatagtgccattccgtagacggctcaaagactaggggatacgtgtaagcatcgatcccagcgttggcaccgaggaaagaagggtgggacgtctccttggtccagcgttcaaggtcgggcgagttgaaggtatagcccatccctgcgagtcgtcccgaaatcagttcgcgagaaaagcaccatcgtggtagtctagcctggacataccggaagtgtgggtcaatagcatcctcaaggtgatggcagtattgggctcctcccaaatggcctcgcctttgccaacttcgggctcggtgtaccccttgaggatccggagggacgaaagctccggcaggtgttttttgatcagctcggcatcgtccagagtcagcagcccttcgtcgaggagttgtagacaggagatctagtagccaaggagatgaaatcctgattaatattgtgtagagtgcatcacgtagcgatggatcgaagagggacgcggctcacggtcgtcatcaatttggtcgacgagaacagctgaagagctatcggcgttggtcacatatcagccccaaaccgattgatctcccagcgagactatcgtggtcgacccggactcactggtatcctcatcgacctgcccggaagactcgtcaccaaacgtcttttcccccgcgcagttcaagtacaacgtctcgtcggcgttggtcgcaccaaagaagacggcggggacctcgcgtgacgcgacgctggactgaagcaggtcgtccagggcttgtttgccagagttcgaagagagcttggccatggtcgtttctcgctttctcgatggcaattggtcgtagactgttggatagcgattgagagtgtgatgtgcgataatagtcatcgatagctttatatatacaggttcatctcgccatcgacgttccggttatggcgggctcacggggaatttgcggaagcaaatgatcctcgggcccgggaaagcggaaatatacaacaacgactcaaaaggtcagctccggttggtcatatagattacatatatagcacaaggctcccgacagagtggtcgagtggggtcgtattggggagtctggaatgcaccgctttctgaaagcgcgcattgtggcgaccgcgatggaatcgccggcaatcatgagttcgaataaacgatggcgtgctgcactactcatacattcgcagccttgtgggatcgtcggcttttcgacaggatgcggtcttatggtttcatttcgatcggttttacaacgtacggagttgcgtcttgtgcgacgttgattacgacccgagggaatgggtctttatcgacggtggggtctgctcttgccctgacaatcgttagtgagcatacaaactgatggtgtcgagttccgacaccgagtaccgaaaatggcgtgcatcctacctcacccgctcaacgaatatgcccggacctcagccacgcttgtcactgccggaatgagaatcgccacgggcaccacgccataatcgggcgactcgctcggcatgacggcgatcgttcccgacctcgtctcgtccccgttcaacagcctaacggtcttgagctctgccgtcttgggatccacctccttctcggcgaaacaaaggatgccggagtacgtagattccggcgaggtggattcgaatgcgacttggaacccctgtccgatcaatatgaagcggtcggcctctacttgtatcaccatcccgaaaccgggtcctgggtgaccaaaaacgtgggcccgagaaatcgtcagagtccaattgccaaaagtgagcgtacgctcgggcgaggggtctttggatccagcgtcgaactcgtcaaagaagaaacccgccatgggggaatctttgcgtcgcgcctccaatatcaggggagcgacgctttgcataagccgcatgtgcttttcggtggcgttcatgtggtcgggcagggtatcgataccaaacggcgacgttgccaaggccccataggtcccgatggcctcccacatcctgatcgaccccaacgtatcccccctttgctcggggatgaacaagggttgtcccctatgacgataagccttgcaagtggtaggatagtcgggcatgtagatgtcgggagcgaggaaagccaagctgggagcgaacatgaaccaaatatccaggaccgtctcgatcggaccgccacaggggtactctcccggattcacaccgtccgacaccgtcgtattcgatccgggcgcgccggaagtgttcctcagccatgcattggcataatgaggaatgtcgtacttggctttccccgccgccgctacctgctcgacgtagatagcatagtggtatgccatgaatagttcatccgtctgcaagctcttgccgaacaattgctcccaattgagcccgtctcgagcagaggtcttttgaaagtgcgagagattcgacctgagttcgtcattgagttgatcccactcggcctccagtcgcgagaccaaatcgacgggcacggcgctcttgaaggctcgttccgccagttcgcctcgatcacgagagtctcccaagaggccgacctcgttttccacctgaaccatgatcactgtttcgtgctcagagtccacatctttgacatgttccatcagagcggagaaagccttgcgatcggcatcgatggcgtcctggttgaaaatggacagtacctcacggacctgaagcttgccatccttgtcgatgcgagcgcgagggaaccgttcgtcgtcggtcttgacccaggaaggtgcataggtagattgccctgtgaacatattcccatcggtcaggggatcaatctgatgcgcaggggcgctcatgatcgactcaccattcttgaatgacccaaaccacagtagaacgaggtggagatcgtgctgtcgggcatcattgatcacgcgatccagctcgacgaaatcaaactcgccctcttgcggctggatctgatcccaggtcacacttccgagtaatgtattgtatccttgatctttgagtcgagcccatacaccgctcatatactgagacgacgagagggacgagttgttgagctcggccgcgagcgagaagaacggtttgtcgcggaccacgatttggtggtgattaccatgatcgaaacgttcgatgcgaggcgtcatttgggtggaagctctacgatgaagtaaattgaccgacttcgacagtgcgtacgacgacttcgacctcctccctacgttggagacgatcccgatataaacctgatatctgatgagcgggtcctctggttcaatgatatcccggggatatttggctccccgccgggctaatcgcccgagaatggtccgaacaccgacctcgacgtcaatgaatgcttctcaaggtggacggtgtccgatggactatcaaagcacaacggcgacgtctagtccgtcactttagatctgattggaggaaaaagaacgccacgtcgcccggcacttcatactgcacctatcgcagggacagtaggtgactgtcaagcgggccaccgattggaccgataaacactcctctgtcgcgaaggtgcccaacgccgatctaggcacctgttccccggcgggggtcccgcaccagccgcgtttcacaaccccgacacgacaagacagatgtcaacgagattgtcgcagcacgggcatgggacatgtcatcccgacattttcaatggaaggagtgttttggtctttcctgaccacggtctctgcgattcgagtgatttgccatttgttcacgcttgtgtcctgagccgaatgatctggacaaccgaactacgggagctattgccaactgcataatgacacacatccaggcgccgcggactggcagcagacataagtattattggggcgagatccgccagagcgaagagcttggagcgagttagctggcgcagagagcaatttgcgccgagtccgaagccaccgcttagtgcgcttgctacttgcttcagcttttctgaacctacaaatacgtgcagctcgtcgaatatatcattgtcgtcgatgtcaaatcccgcgacccccgttctctcccggccgcctgaagtagctattgatcgatcttacgtatcttttcatctgacaatttcacgtccaaattcgatcacagtgggacatactcaggcatcatcggtgcaaaggcgatctccagccgtcgaatcggaacggacccggagagacctgatcaacacgacatgaagcttgtgggtatatggaggcatgggttggcatttcttgtagtacatcgcgctctgcagtaaattattgatatgtgttgcgaccccatactccgtcccactgatttacagcaggtcctcccgaggtcgtattcggcagctgatcagacggagctaacagacccggttggaacgggtagatctgtgcatgcggaacagacacccgatccagtagcatctgaagcatttgagaatcgttgtcatcgagatatcccaatcctggcgagaaatcgaattgaacttgatcgttctcggctatcccttccggtaccgaaaactgctgcaatggttccgggttccagatttggacgggatgcccgctgttctccggctgtcctgtatacgccggtccagttgcgacctctgcgctcgattcgatgactgccgtttcgtctcgagcagagagacgatttggtggggacgtttcacccctatcgtcagatgccctttgctcgatcgatcgaggtgcttcctgtgcggaaggactgacaccatagtccgaagcaagcgcctcgaggatctctgccttttgcgccgccgccgaccaggagcaactcatgtgtcgcagcatggcgatgcaatctttggaaccgttgatcgcgttgcggcggcgtttcggagctcgagtctgaaccgccgacagcaggaaggtagttccggcagtgaacgcagcctgaagagctgtgggcgttgtatatcggagattgtacagccgatgccagatgcgtaatagcgtgacgatgcgtagagccgctcgatcacattgctagtcaaccagatatggattcagctcgaaagacgatggctagcaggtcgtgtaacataccttgactgattccgacacggtctctgctcccgaacccggaatcggcgaaactttgcggtagaaaggcctgtgaagcaggattgtgagccacatgtgcgtgatgtgcatcatgatgacgtgaggataggcgttcgagtcagaatgacctgtgagaatgacggcggagggtagttcgtccttccaagtcgtcaaagccagactagggatcggtgtggaacgttcgttggcgtgcggatcatcttccaggttcgggacatggatcagcttacctgatctcgctgaccagtccagaccggccaattgctgacagatttgctttgatactgtacctattaagcgctgttactttagtactgtctgacgagaagactcgacgaaccggcttacagcgagttcataatgtcttgtccgatacgcagcagcttgacagtctccacaaagcctgtgctgatatgacatgggccttttttgaccgtttcggcgcccttgaaaagcgtccattgaaaatcgttggtcgcagagtcgggaacgggcatgctggtcctgcgtgacggatgaacagcttcagttatagatcgtggtgccacaatatcgtcctgactgacgtgtattcaatctgcgatccgaccctcccgatataagggctccatgcagtctcttgcgagaaggtcgaccagaatacgacggttcgctaagggcgacctggagtatcagccacccgcatcgcaattgacaagaggtcgacctacttctttcgcctccgactcggaaagtttgccagactcgactagtgcgctcgggtcaagatgaagcccgactgacgggtcgcccatgcgtaagagccgggacttgccaagccaatcctgacggacttacgagcttgactcaacctcgaagcttgtcccatatatgtccagcccagattgtgttcgccttcgagagagtggtagctagatagactggcgagaccctgcacggtcgcgacgatcggattcgagctctcttggtcgataaaggttttggcctgctgggcaaagacctttcgggttccgggaaatcgcaggtgttcctcatctgcgtagcacaatgcgatcgacaggatcgcattgtgtaagagtgggctgtagtgtggtgtgggtgcagacgcagggatcatcgcttgtcgcatatctcgctcaaagtgatgtctcgtgatacgttgacctgcagcgtatgcataagagagcttgtctcgcactcatggcaaactcatactatgtactcacaccaggacgcatggaagcgaaagaatctgtcgagtgccgtatggtgctgttgggtcgtcaggaatacctccttgggcaggtacttgccataaccgaacgccggagtttgattaccaggaacaaccgaatcagtcaaggagtgaagtcccgtcacgggaggggatttgccgatatgatgaaatgccgataggggaccgtgaaagtgcaggtcacctccgtgagactcgacctgggcgtcaataagcgaggtctaatgtgagcgtgggtctgatcaagaagaggatacgggaactgacgatgtgattggagctggatgctcgccgctccgtttcctgatctgcttgctccgcctcgagatcttcgccgtcgtcgtcctcgtcaggaaagcttcctcttcggcgtctatcgtcacttccagtttgaagtgcggctgagacgcctggttcccgcctgacagcagagccatgggacgctccagttgggtccaatccggcctgctcgagcaggcgttctaggtcgaccagccgagcacgcatcgcatccatttgctgtctagacgcaagtcggcgagagtctgctttcgagtcccaatgacattcatcctgagttgaacataagcgtgagcggaccggccatgtcgggagtacagcagggaactaacttgatagccccgacatgttccgcactctggctgtacaccgtcgcatttggctctcctaggtcggaagtcgtctcagtatccgtgcaacgagatctctcgatcactgtactcaccttcgtcggcaattctcgcatgctttagcgacattacggcgtcgctttgttccgctactgacggtcgacggaccggcttccaggtttgggttggagggctccatatgaaacggtcgggctaaggaagaggacgacctctcaagagtcattcaactatggttgagctctctgacagcgatgaggtgagtcccatccagagtggatgaattgactacaagttcactatggtagatattatatctgtctggacgagaagccgtagttgaaccgagtgggcctccgcaatctgtgccgaacatggccgatatcggctgagcaccggcgtcacagcttgccgctttcttgtctttgaagggatcaagcaaatgcaagcaaactctttctgggggaccttgaagcgctcatgacttctgcaataggcaatggtcgactttccgaccggtgtcgagataggggtacgcccggtttaggaagcggaccggagccgcgcccgtcacacacgcgataatgaccagtcgaatatgcgcaaggtagcgttctgacaacgacgaatacaacgatctttccattatgccagcaggctcccggctactgcaatgtaagggaggagctattccacgataagagccaggccaacgactgatctagagatgctttctttcccatagggacgagtagttccgtttgctcatagagcatatctaaagctgtgatgcttgtcgccatcaacgccggcgtcatcctcggccagcttttgctcttcggtcatcagatctcgagcggcatttcgtcgtttccagacgaaatactcgatcgtgatgacgcccagagcagccgccatgcatgctagagagaccgcatggcccaggaggtagcggggcttatccgtcgaacggtagatttgaccagcaacactgcgagtcggaaaggatcagattcgctcaatgcatttcgtcctggctagacagactaacattcctccagtgttacccatggcttgttgcataccgatagccacggatcgcttacggaatccagcagtgttctctgcatgcggaaagaagtccagttgatcagctaatgctcaatgtccaacccgaattgcaggcagggacttacggccgatccatgtaaagtgcagtccaacacagatgtaaataccggcgcccgccaggaaacatgcaaatagcttgacggcgttgttcgagaccgcacagagcaagatgtaaccgatgatcgatacgcaggctagggggaacatgagtccccatcggatcgaatacttgtccgagatcaacgcgccgatcaggtagaccatggcggcgactagggagaaggatattaagatcagcgagagatatggtcgaccgtcgacgagaactaaacttaccaaagtatacgggcgcggtcatagcctgactctggattctgtcgaaaccgagctgattgatgatgacgaccaggaaagtactctatatcacgagccaggctgtcagtcgacactcatagcgtgtgtcgcggagcgaatgctcacaaatccatagaggcagacgtcaaagaggaattgaccgagaccagacaggtagatcatggggtcgctgttacgacgacgagcatcagcgtcgcgcttgtaccaacaatctactcggtagatgactcacgtaaacgccttcttgatctcaactgtcgagaatccgtcatccttgctgaacatggcagccttggcgtccctgactttcatcaagaacatttgcctgtccgacaagtaggtcgcgtcttgccagcggtcggcaatgacgaacacagagatgagaccgatgacgatcgtgatggcaccctcgatgatgaagatccaacgccagccttcgattccaccaactccgtccatcttgagaaagccggccgcgacaagcccaccgacggttccgctgagggcagccgagatgaagaggtagcacattcggagggccagctcgtttcgttgatagaaagtcgtgaggtagagcatcaagcacggggtgagagctgcctcgagacctccaagcaggagtcgggtcgccaggatcgtagcatagttggtggagaaacccatcccgagcactacacctccccagactaggacgacacccgggatgagacggctgggtctaagggtacgaagaagcgtcgtgaaggggacttcgaggaggacgtaggctgcgaaagacggcgttagtgtcgccagggctgacggtcgacaagcacatgacgtactggcataaaagatggaagtcgcgaccgagagaccgtttgcaggaaatttcaggtcggccgtcattcctccaaccgcggcgttacctgcgacgtatatgtatcgacagttagcgctacctcctgaagtttgcagtcggtcgagctccaagactgaccaatgttgccttagcgggtcacaagcgagagtcggtcagaatcagcacagtccaagccatatctcgtggggactcacttcgatctaaaaaggcgatcaagtagaggatcatcactagaggtgcgatcctcgaatcgagtctgcggaggagtcacctcctctcatcgtccggaatctcgtacaaggccaacgaggcctcatcgtcgctttcgatgtcacctcggtaagcgggatcgatgttgaccaccttgccctccagttcggccttgccggctgcttcagccttgtcttcggttacgtaggtcgacatcgatgctttatttgttatgaatggatagccaggtcatatgggtgattgaccgccaggtcgaccagtgtcgacgtgatgctatatagatagacagtcccggttctgatggctgatggatgcactatcgcgatagtggttcacgtcttggccgcgaccgggaatatgatactgaatagtctacatccctatgcaattgcggggtctcccccttgaacctgaccagacccgtagcgaggttccggagcgttccctatgcttttccgggtgctgacctctgtggcccggaaatattggcacgaccaagtggagcgacctcctatcgggcggccatcggcgcgtgacccctattcacgtattcgcgctataagcgctcgcttaggcgcaatcgaactcgaagaaatccccgaggtcccccattgagagatttcctgctcaggaaacatacaggatcagagacgggacgggcggtgtcggggatgtctggtgagaatcaagcaggaatacatcgtcggcaagcgatacgaaatatggtctccgtcacaatcgagggcaatgacattgatttgatactctcaaagacaaggttgggtgggggaagatacgtctcctcgctacaacgctatgactgcgcgagaatggcagatacaggcagatccacacagaccatctttcccggagcgtgtcccatgatgatgccgtcgacgtgtggactcgacatgataacctgttgaggcgtgaccccacaaccccagaagactggcacttcgttttcttgcagaacttcgggcgcgtccccaaattctggctgatagaggtcccaaataccgaattgctcaagcgtctcgaagccctatgaaagcacgttatcacatgttcagctcagtgtagagactcgttgctggatttcgacttacccaggcgacgggctctccgtgtgttttgacgtatggtcgagttatcgcacgaaccttttcgacatctgcctttttgtacggtctcatcgagactaccatttctcccctgaacactattatgcgagtatcagcttgcgaatcaggacggataggggaacggatgtgctcacctccagcaggtaacagtgggtagctggttttgtacattggaacgttggctcccgtcatcatatgtcgtggaattaggcctgcttcgcacagggcctgctcaaaggtgaaagagcagccgactgcagcagatgagaccttcagctctgggggcttttgctgacgactcaacgcagcaagaaacactgactgagaaatccaacgctatctacttgccagaatcgctcaatgtcagggatgtcatggtgaagaagctttccgttatcgtatctgaaaatccggctgctttagctcatctcggcaatctgggtcaattcgccacttacacgttgtagccaggagcatcgtggcggatatctgagtcttctcccaacggcgacttgaaccgagggtctcccttgcctcgagtctcacccacgagcgggcagctgacgggattgcgttcacagagcgttcggaaatccgcggcgtatttctctggcaagacgatcaaattggcctgtgtgtaacctggacattggccggctgtcggttcgcgaaagagacccgagcggcaagcacggcgaacatcgagagcagtcggataggcgttgagcatgatggtgaattgagtcgttttggtttgacaatacaggcctgcttgaaggtgaggagttacgacgagttgcgagctgtcgagcgttattatctagattacagacgggtctcgagctctcgccggctcggctgacaatcgccgggtcgcgtcggggaagcgcctgttcctatgattttccggtgggaacgctcggcatcgccaataaagaccggagttggacatctcattcattcatacaactttgttacaacgtttccgctctgcccgttctctgggtactgcagcgcacgcgacaaactaagggcgggtaatgaggagatgacgggaggtcacattggcggaccaagtgctgcgaaaagcgaatcgcggttatgatctctcgaagcggatccgcgaaagacccaggcgactcacgaattgacaaacacggtctgcgtcgcgtcgatgatcaaagcgggtccgtcgacagcgtcacctacatcgagcgagccaagttcgtagaccggaacgtccatacgctggcccttgcttgccccagggggagaaacaaagaccgattgtcggctgtccaccttggcgggcgagactgtcgcgggacgaagtcttttgaattcggcaaataccgactcgcccaaatcgtcaaaggtcttgccgattcccttgaccttgatgtcgtcgacaacgacaggtgtctctaaagtgaaaccaaactgttccttgtaggctttcttgaactcgatgccaaacttttcgtcgtcgtcgcaggaaacgagaagagtcgtgtcggtcccctcgaaacgcatgttgagcatcctgtcgaggcggatcttgtcggaagagaagccctgcctgtgaagctccttggtgacggtggtggccagccgatcaagtgctttggtaagagcgccgatcgatgacggctcgtatgttgcggagctgggctcttgaatttcgtagactctgcgtgcatcgaatatgagatcaggttagtacaagcggagagcgaggtcgtatcgtcgtatacgtaccgctccgccagattgagaccataagctgagagaatggacgaatacttgtgcacgagaattcgcttgatccccaagatctcggcgatttcgcaagcgtgttgacctccggctccaccgaatgatgaaaggctgcagacacgagcaagtcagagagggtctcagacgtacaatacaccgtacgtacacatgcttggcagtggcataaccgcgtgcttcggtgagagtgcggatcggtcgagccatcgtctcgtttgccacggtcacaaagccgtagacctgcgagatggcaaagttgtcagccttacgattgacggagacgcgcgctatcccgaacgcaccatctcgtccagactcatgttcgaaccggtctcagcctgaaccgtttgcaatagatcccggaaagctcgctcggaagccgctggatcgagagcttcatcttctttgggaccgaagcatcgagggaagctgcatgggcaaagccaaggcaagcagggtcagtcttcgcacgttatttggagaacacctcgacagcctcactacttggggaccaagcgaccaaggaacagattgctatcggtgagggctagaggaccacctttacggtagcacgcaggtccagggtgcgctccggcgctttcgggtccggcgcagaacatcccgtttcggaaggtcaaacatgagccaccgccggctgcgacctataggagcacgccgaatcttcagtatgaggaccacgatgtgaacgcgcagagacactgaccgtgttgatgtcgagttgagggctctgaatgctgattccagcggtggtggtctcgtaaacaatctcgtaccgtccgtcatacctcgacacatcggtcgaagtcccgccgacgtcgaagctaatggcatgatagatcagccgaaactcttggatcaccttggaacaacgccaactcacccgatgacaggcgcggggttctccttgtcccaactggtcaatgcgtaaccgacaactccgcccgctggtcccgagagaatactcttcaaccccgaaaagttctgaaacagaccgttgacgttaattgtcctgcttgagtaattcgcgtttccccgctgtactcacgtccaggtcgcacagacctccgtcgctgcccataaattctaccttgagtccaccatctcgccctccttcgaaacccgagtagaatccatcgagatagtctccgaggacgggtgtgaggtaggcatcggctgtagacgagactccacgcgagaccatcttgatcataggcagcagctgagacgagagagagacgtggtggaaaccgacttctttggcgagcttgccgatcgccagctcgtgattcgggaacgtgtaagagtgcgccaagacgacggccaacgatctagtcccctcggcatacagtctttccaggtctgcccgagtacgttccagatcaatgtcttgcaagatttcgacagcctcgccgctgacgccgcgaacgatccggccatgctgtctgccagactcgacgttctgagatccttcgccagtgtagcctttggtgatctctccttgctcattaaagacgacgctgtgctcttgatgccaaggatcagaggtgaagccgactaacgtgactcgctcatcgatctctaccacttgatcgtataggggagaaggtcgctttatgttgaggtcgaaaatgcgaggtcgggactggttaccgatgctcagcaggtccttgaagccgcgactgtgagacgataggggctgagcgtcagacacgatcgctcgaaaggcatagcgaggcgacctacgtgatcagaagagcgtgcttctcgcctttacgctcgagtagagcgtttgtggccaccgttgtgctcaagcgaacgaagtctgcaagacgaagtcagcaagttgatcactttacacaaccgcgaatcagagctaaactcaccgatctttgaagtgggcagaggctgtccgcgaggtactggtcttcccagccgcttctcgagcgctcttcgaattccctctgacggtccagtcgttaaacgccggtaaacgtcatgcgggacaaagtcgacatcgagggtcgaacttacccgtcggagcgtcggcatagttcgaggggtcttgcgacaggagcttcagaatgaattctttgcggtcctcggtatcggcggtctcttggtacgatctgtcgagtagcaactacgggattagcggcggggaacattggacgagagaccttgacgaggtatacttgcacaaagacgtccgtaaaggtaccaccctgttcgacacaattgtatctcaaatcagtgcgaagttctggtcggcaagacagaccggccacacttaccctgtcgatgctgattcgaatcgagtgatccgggatgctggcggattgattgaccatgtttgctcttattgttacttagggagttcagtgggatacagttgctgattgctatcgagtgtttcgagttgatgcgggaagatgtgcggcaagaggaactagttcagtcctctgattgacgttcagactagccggtagatctttccaggtcctgttcgacgttacggtactcccagtactatatgtcacatctcgtcgacctcgccaggtctaggcgttggaagccggctcggcggcatggtccggggcagcccaagcagggcaatgaccggacctgttgagcgtttgctatctggcatgcttcctacctattcccgaacggctttcaggtggtgtactgcaagcgagttgcgagctgatagcaagtgttctccggacaggaggagtagagtcgtagcgttgtagtcgagatgggattcgaaatatacggtacgcgccgggaattcaacggagtcgatcggtcgagtccgaacctgtcctgagtcaatatttccggtcgtcaacctctggtcagagtcgttctgggtacatcggtgacttcatttcctggccaggataagccgaatacagaccggagtgatcacttgacgtcgtgcggtgaacaatggttgcggtactactccgtccgccacgctctcgaccaggacggtccgaggacctggtgagcagacgcttgcttaaggatgatctatatctaaaggtcagatggcttatcggattgctgtggatctcgcatcagggaaaccctcgtcgtcacaagttggataattcgcttcgtccgacactaccatgcctactgccttacacgaccaagcggtcgaccaggtccaagccctgaaggccgctcgtcatgctgaattcgacccgatcattctcagtctcttgtgagtcgggggctggtccgattatggtcaacactagatgctgaagcatgtctttgtactcgcagctcgaaccggttcatgtcggtggctgaggccatgggacgagcactgcagcagacgtccatctcgaccaacatcaaggaaaggctcgactttagctgtgctttgatgaacgccgacggatcgttgatctcgaacgctcccaacgtcccggtacacttgggtgagcccggcatgtgatctgacaccaggaacaccacgttcggctgcttaccccttatttccgatacctgggcaggcgccatgtcattcgctgtcgtttaccaactcgctcgactaggtcctaccctgcgtcccggagatgtcctcctcgccaactcgcccgtcgccggtggctcgcacttgccagacctgaccgtcatcacgcccgtcttctctcaacccgatcccgaatctgccgaagaacccaaaatcatctttttcaccgcgtcgaggggacatcatgcggatatcggaggagctcaaccagggtcgatgccgagttatagcacatcattgtcccaggaaggcgccgagattatcagcttcaagttggtcgatgcaggcagatacgatcgagatggcttgtacaaactgctcgtcgaggatccggccaagatccccggttgctcgggttgtcgagactttcgaagcgtcgagtcggatcttaaagcggtaggtccgagtcacaaagcttgtccatggatgacgctgatggcgagacgaatgcgccaatagcaaattgcggccaactacaaaggtatccagctgatccacgcgttgatcaacgaatacgatctggctaccgtgcagtcgtacatgggccatatccgagagtgagtttgtcagactcgactgcctagtgttgtgtcgctaacgtgcagaaacaaacagtaacgctgagcgagcagttcgtaagatgttgattgccgctgccgtgtctgccggtaaggacacgctcgatgtaagtcaattcaccatgttctgcagaggagcggccactgataccgaggagactttgcaggccatcgactacatggacgacggctcgcccatcgcgttgaccgtcaagatcgaccgctcgaccggtgacgccacgttcgactttaccggcacggctccggaagtccgaggcaactggaacgctcccatctcggtcgttcatagcgccatcatttactggtaagcacgacctgcctctatctcgtcttggccggttctgattgaaggtctactgcgatagtatgcgagccatgatcgaccaagacatccccctcaactcgggttgtttgctgccgctaaagagtgagtacggcgcctagagatagcggactgcagctgactcggccttcaaaccagtcatcattccggacaataccctgctgtccccctcgcccgacgccgctgtttgtgctggaaacgtactcacgtcgcaacgcatcaccgacgtctgcttgaaggctttcgaggcgtgtgctgcgagtcaaggatgctgtaacaagtacgttggcgtccatccctccagagaaaccatagccctaacatcgagccacccagcttgtcattcggtgctggcggaaagaatcgagagacaggcgtgatcgagcgcggatggggttactacgaggtgagtcgtcgcggtctctttgctcttacaaggtgattctatttctcttgcccaaacattgtttcagaccatcgcgggtgggagtggagcgggcccaacttggcatgggacatccggagtccagtgagtgtcgctgtgaatggtacgtcgatcgaccgaactgacgtggatgtgtcatagcgtgcacatgaccaatacaaggatcacggatccggagattcttgaacgccgatatcgtaagcgacttgacgaccggtccgatctgcgctttgccactcatctcggtcccgctcgcagcggtcatccttcaccaattcgggtatcgtcagggatcgggcggggagggcctgtatcgaggcggaaacggtgtcgtgcgggaaatggaattcttgcaaaatattgaggtgtccctcttgacggagcgcagagccaggcaaccatacggtctcgccggaggtcacgacggaaagagtggcctcaatatacacgtacggatgagcaaggacgcagagggaaaacctgtacgtcgagaacgcaacctcggtggaaaggcgacggtcgcctttgaagcaaacgatcggctaatcctcaacacgcctggaggcggaggctggggtctgccaggcgaggctatggagccacagcccgagcagttcggttggcaaccgaggggaagtctggccgaaaggactgccctcgaagccgcgttcggagcctgatgtgatgatgttcagcagttgtatcgacttttcaaagctataaatctacaggatggatccgccgtgcatggacgagtacaacaccggactttgcggtaaaatcaatcgattcttgacgatactgtcaaatcctgcgacaatgtcaaacgacgaggcgattgtttagccccaggcgatcggaaacggatcgggatcgcagcgcgacataccagtgcgacgatactccgatgttgcaaccacgcataccctctcggacgcacgtgacggtaaacctgtcgtgacctggccacggctgtgtttcaaggaaccattggttctccggccaagcgttccagacatcgagagcgagcaggacctttcctgatggagcgttaaccgtcctggggtggtgttcctctccaccccatttccaatccatcgcgatgccgtcccatcgatgttctacctgtcgctcgagttctcctcggacttcgttgaagaatggaagcgtactgagccagtcaggggcgcgagggaaaccagctgcaccaatgataaggtgtccctgttgacccttcacacctccccaacgatcgtatcgtgtactgttgacgtagatcgcgacaaccagtcaatcggatgcgggcgagattgacattctggcggtgtttcgacttacaagttcgaattggccttataccattggtccgtttttgtcctggcggtttctagccagtactgtttacatcgtcgcttggtatctgaacgctggaatgcgtcgaggtccgtggttaggctttgcgattctagagcggctgacacgatcggacgaccattgactcctggatagccgagtatatttttctgttggagaaggagggtttgtagggctttgtccagctcgcggtagaaattacttccggctgacattgaatgctggtcggtttcgtaagcgccgattcctgcatatgcctggaagagatccttcaagggatccagccaaaacgcctctcgatgaccctgaacaggccgaggcaatacgccacccacaggtagcggcttgacccagatgcaagaagtcgtatactcttcggatgcgaggtgcgctctcagttcagcgcgaaggcttgcatcgctatacggtccggtcagatcgagagtctctgcggttgaattgctgctgtacatccagccgtctgccgaacgtgaccctgcgctcagagcatctatggaggaccaagcatcctccaggtgatggactggcgatgccatgccaacagctttaccattgacgatcttggcattgacggactgatcggcggctgggtagtcccgaggacgatttttggagaacgatgcgatggcctccttcttcaagtcgtacgtctgatatgtgaagacccagatggcagtggctataactgcttcctcgtaggactcgataaagtgatcgccgtgttcggcctggtatgtttggacgtcctgagcagctactgcatcctgaatcatcttgtgctccgcggatccgtcgaccgacaaagtggtgcgtttgggtttagcgaggtattccaagatcaatgtcacttgggggatctccaggtctccgtaacgaatctttgttagatactgggggataaattcgacgttcatgttgtgatgcctttgagcactaaggcaggtgttgaagtggctgacccaatcagccttatcatggataagcgtccatttggcccggtctccggacagcgactcgctttcttcggcagccatagccggagggatgatcgtgccagatgaagcgataagtccggagcccagtttcacgtctttcaggggctcttgaaggaacgtccggtccgagggttttgtaacaggtacgtagggccggattttgatcgggatcgcagcgggttctcccttttgaattttctcgcgcaaagtgcgctcaaaggctccgtaaccaggataagacgatatcaccgcaggcaaatcggcaatttggtccatctaatacaggaaatgaaatattttagaacgttcccgggcggagatcgagtcactcgcgcttacttcgatgattgcccaactcgcaggattgtacaggctcgccaaccattggctaggtctgagggtcgaagacgtggtcaaccagtgcgacgtattcgtatggagtgcaaagagatccaaactaactttgtagccgcgaactgcgatccgccgattgcccttagtttggttgccatttcgtcttggtacaaagccgatgcttgtgttgaccgggtttgactctcgcccgcaatcttcactgcgccggaggccgccagcggcgcggaaacgctgacttccaccgaggcgctcaatttggacgacgccgcagcagtcctctcatcgtctcgactgtcgatctggtgactgttccaaagtcgccctcccaaagtgacttcggtagcgtaaaacagtcctgtgcgacatagtcgtatatgattgaggttcagcagccgtaaactcgggttaatcgccggatgcatcaagaatatacttaccaaaagtttggataaaattcgcagcgagaacgtatgaaggcgtcttcaagaattggtcgaccgcttgcttgcacgcatcgctcaattccaagttgctatggcctagcttcagcgttacaaatgggaactgcacatgcggagcgagaatcagcgacagagcatctccggatgacagcaatcaccttacgtcgtggtaggtcacggtcgatcgataagacctttgtgcggacgaagtctcggaagtttcgtttgtactaccggccttgatgccacctcctacagtaaacttggagatgattccctcgctaagacgcccagggctccgccaatcagcgagttgatagcgcaagacgtcggagccgacccgtctggcacttacgcctttgcttccatctccttttttcccaaaccgtgagccatcctgtcctcctgctgtttcgagtcgatcgtcatgtgttcgattccgatcacacctggtttatcaaaggtgaacgtcttgggggaattgaaagctgaggcaagacaaggaccctgccaagtcagactagttcgctggcaagagttagggagaggggtgcaagacctacctgggcatcctgaataactgattttcttccccgagaagacttcagcgccaaaccctttgagtaaggagcggccatcgaagattttgatccattcttcgtcggtaggatctcgagctctgtcgaacgctcagacatcagtgaaatgccgcctagctccgatgcacacctaggttgcgctcacgcttctcggtagaggtccgcttcatcgtcggaaggtcgacccataagggtgtcgacatcgataggtaaccgatccctcgacatcttttccatcttgatatcagccattttctgtcagtggccgagagatcaatatcgagcgcaatgttcgacaaaccatgaaagacttgcctcgtagacgtgtgatttgcctagacctttcgcaagctctcgcgaggaacgaacagtagactcgtccccatcatcgtcgtcctgtcgcgcctcgtcaacactttgcccatcctcctcgtcttcgtcgtccaaatcttctgagccgtcaatctcgtcgtcctgatcctcttcttcgtcaacctcctccttagcggtcttggtgcgagacttcttcgcgtcctgatggtccttcgtcttgacacgcttgtccttgacagcggcgacctttccacgaggtttggtcgataacggttccgaacctgccgatttcggtttgaccttgccatcgccaggcatcgtcgattttggctctggccgttcttcatcgctggcggtcgcttctttcctggtccttttgcgttcggcagcctttacggccggggaagcggtcttgtgtttcacgacaggtgcagtcatatcgagatggtgtgtagattgtttggaagcgggtgagtgtgtatgaaagagtttctctcgtgagccccatcgaaaggccatccgggacgtcccttatatacgcatacaggtcagtttcatcgctggataccgcacaggtgcgaggcatagccatctgtagctccgccgttgtcttcacggacttgtccccattgtcacttccagtcaggtcctctctgacgggatcattcggtgcagaaggttcggcttctcggaatgtttttcgggtacggcgatgttcctggtccgtcctgctgcacccagatctgcaacgaacgacaggggaatgggttgctgagaaccagcatattggtccccttcctcgcacggaaatccctgttcccgtggtcaagtttgaattctgtgccttgatcctcgttccgaacccatggccgcccgacgggcgatcgatcaccggtctcggatactttttggtttagagtttgatcagggccggagatggcgagccatatcctgtggggtattattcattattgcctggatgtgattaggtcggggaaagcttgcgggttcggcacgcggagtctttctcggcgttgaccgagaacatcggcacggccaaacccaaatcactcacggtgagagatccgtgcagcatgtccaagcgacgctggctagttgggcgaaccgactaggttggcatccggtcatctgaaactctatctggcagggcagggattttcgcacgagccggatctttggcatacatgatctcccgcgcccggtaaacacccaacttcttgctagttggagaacaattggggaagatggcgggtcgaccgcgatgactgtctaggtatccaggctcatacatgctattacccgatggaagcttcctgcaatcgccagggtggtttccgaggtgccagtcgaggcatcacaaggtggactccaccatttcgatcgtattcaaagcatctctgaggaaggtgacggcgatcggagttcgcgtaagcctccagatcggtcaatttatgacacgataacccaagtcttgaagctttgtagcaggcgtaatggacgcacgagacatgcgcgactgctgccttgaactcagacgagctctctgggctttggtactatgaacagccaatgtgttcattcggaattagctcgtcggaggcctcttctgatggcacgtcctcaccagattcctataaccgcacacgaatagggacacctcggccggaccgggtgttcttgaagaatcgtttgtagactacagcgtcgactttaccagtgatggttccatgcatcgcgaacgttacaacatgaaaagggttacaagcacgcgtactaatcagcccgtcgtcccgcatcagccttgactagctccatttccaagcgctccggcgaccatcgctctttcaagcctgtcacgaccagatcttgttgggttcgaggacagtgctacgtggtttactccgtaagacttagcttgtgaatcctagatgatagactatctggcctgacttaccccggatgccggtgggggatctttgtccaggttggtagggaacgaatacccgtccgcaatcgcttgtacgagtgcctgaatgcgtggagaatcgatcttgccaccttccttttcgaatagcctcagcgtctccacccatgtgcaaagtagcaatttacttcgatccacgtgttccatcgctttaccccatcctgcggatatatgtaacaagttggcggtcctctgatgtcccgtggtatcgttgttgccagccgcgtgaaacaatgcagggttgaagaacagtccatcagggttaggggttaggggttaggggttagggtggcagggggggaggagaagcgagtgaggagagtgtttttgatatcattcgtcagcttggacctctcggacctctcgccgacccggtggactcacaaggagcatcgctcaagacgtctgcgctgatgatctctgggctcgggtgagaagtggtcaacccgctggactgatgagcgtcgatcgtggcctgatcgtgcgagacgatggattgggtgacgttctccttggggtccgagacgggacgggtagggttcggggtgagggtcgagttgagccgggtggcggtgatcattcgggtagggatggaacgtctgatggcgaacatgatgcaagggtgtttccgagtgtgtgtttgtttgtctatcggtgaagcactagtgatgtgacgacctaatgcataggatgatctgaatacatgcatgctacaagctacatgattgattgaattcgatgaatgctcgttggtcgcggtcgataggaagggtgggctgagggtgttgccgtaatcagacacacagctagctactctcggtggactaagagtccgaggtcattgttattacgtaccacttgtcacgtgaaaccccactatctagccctagccccagctcgaacctccactcccccccccatcgtcgatcgctcagcgtcgtctacgatagatcatcatccacccaggcatgcacctatcatcatccatccatccatccatccatccatccatcacaccatcatcatccacaaccacttgcaactcgcaagcaatcacataggatcaccgtcctcacacgaacgatgatccccgcgcaactcagatcgagggcgtcaaactcgtcctcgtcgatcatcctcgaccgtcacctccaccgccatcactttcggatacgcgcgacctatgcctcgtcttcaacctcgtcctcgtcctcgtcctcgtcgtcttcgtcgtctttactgcacacgaccgcccccatcaaccgatcacgtcctcgacacccagacgagactacagatgtcgaccttcctacgttcttcaccggtaacaggtccgtctcgacctcgggaatgggaggtgggggtcgagctcgatctccggccttctcccgaccgtccatgatcaagctcggggggatcgtaccgggtcataatactgggcaatcttatcgtaccgcaggcggagggatgggaggaatgtcgagtggggaacctgatgatgggaaaccatactctggttcggctggaccttcgcccggatccggacctctctcgtcatcgtcgtcatcatcatcaccggcatctggccccacacgcagcccactgttgcccgactcttttcgaacgacatacctacatacctctcttcccgctcctaccgacccggatttctacacctcgtcactcgcctcgcacctactcgtctctttcctcccttcacacacctcggccatcgcgggttcgaaaccccacacccacacccacacccacagctccagtcccagctcatccaaacgtgaccctccgacgttggccctcgtctgcccgatcgaaggctccgaatctcataccctccaaaccaccctctccgccgccgcgctcgtccacgccgacgtcgtccagctagatctcgtccgtaccgtcgggctaggtatcgacggcgattggggtgaacgggcaggcgggttcgtcaaactagggatggggaaccccgtcctcgtcaaagatgagagcgagatccgagggtctgtccccgccggtcttggatcgggatcgggatcgggggaagaggtggatggatgggcagatagggagtttgacccggaagaggatggacaggcagtcaaggagcatgaagaggcggacgaggaggtaggtgaagatgggtccgaggaaggggaagatcccgaggagggacctggtggaggacatcctcatatgatctcgggaccgttcgagatcgccatccccgttggggggtcgggaaataacccttcagccatgcgaggcggcccggatatgctcggcggtggaggtcccgtcatgatcgggatggacgaggcgagggatgtaggttccgagcgagataaagaggggacgaggcaggtctttcaagaagtcgtcgatctcggcgaaaacgacgacgacgacagcaaggtcgaaccgggccggggaactcgaccgagaatcatctacgtgcaacattccacggcgatgaacgcttcgttctcttcctggtggtgggccctcacgcgggccgtccgcaagaggaacctcgcagggaaaccgacgaccatcgtcctctcctgtaccccctcgttcttgcacctcggagccaacctctccctccccgcacccgccgctccagcagaaccggcagagaaccccgggttgccacccggtctgggcgaactgatgaaagccatgaaacgtatgcgggagggaccgggcggtggatcggccggtgggggaaagaaggaggacgagttttggaaggggagtgaagaggaggacaaggtcggcaggagaaagaggtcgaaaaggagattggcagggtttcagctgggcgacgagaggtaagtcgacggctgacggtgcgagaatgattcaggtcggctcggtagctgatctccgaatcgttcatcgcgcaaaaacgtgatagagctctgaggcgattcttgcccacgtttgccgatccggatatccctagccactacccgactgaagccaaggaaggtttgatgcgacttcgagggactccactgacgaccccgaggatctggagggttctgggtacgctccctgccaagcgggacgaggcggtcgagcgcaaggagcggtacgatcagcgactcgagctcaacaggctcttgctcaaaaaggcggtcgggaagcatggtctccggtttaccgacgccggcatgggcgacgagctgaatagcgaccagccgaggtcggacgaggtcatcaaagagtaccaagagctgagggacagtttcgcgctcgccgtctggccatggacgacgttgcaacacttggccacgatcggggtgggacacgcgttgacgcagagggtcaaggcgggcgaggttgttgacccgtcgttcgaggtcgggtggaaggatctcgccgaggcatcggtcgtcgaggcgcatgcagaggacggattggaaaagtggaaagagactcacaaggccagtcctacggtccagtccgccgtcgtccaacctcaccctcgcccgggcaagaaatcgacgggttctaccaaatcgggcgaaaagaagctcgtcgacccagtcgtcgaaaagctgaaaaaggacaagacgctcaacaatcacgaaaagcgattgctgagttgcatcgtcgatcacgccgccgtcaagaatacgacgtttgacgacgtcgccatggaggacaagaccaaggatgctgtacgatcgacgatcagcttgcccttgctgtatcccgaggcgttcaggagtggcatcctcgcacagcacgcttcgcaaggcgtcttgttgtatggtacgtgtttgatcgggtcgagtgggaggttccgaacgaacgatccaaactgatgggcgtacattacaggacctcccggaacgggaaaaacgcatctctctcgagcactcgccaacgagagtggtagtcgcatgatcgccgtgacgtaggtcgctcagcgtcgacggtgccatgacgacattgctaacgatcgattcgcgcagaccggccgatatcaacgacatgtacgtggggcagtcagaggcccggacaaaggcactcttcagcctctcccgtcgactctcgccctgcatcatctttatcgacgaagccgagagtctgctcgggtcccgtggagggttctcatcgggcaacgcggcgcaccgacaggtcctgaccggtaggtttcacgccgcaccgacgtccggttcgcacgctcaaccaacgattcttttcacagaattcatgcaagagatggacggcttgacatcttccggtgccaacaaggaggcgagggtcagcgtcgtcgctgcgaccaataggccattcgtgagtcgtggtcgttggtagtagttttcagaccgaggcgattggctgaatgagactattgatttttttttcaggacatggacgaggctgttctgcgacgattgccacgaaggtgagagacgatgggttaaatatcacctcgacgaacggtcgctaatcgaccgagtttacggccaaccagactcttgatcgacctccctaccctcaaagaccgtgaaggtgagtccttctgcttgacactcgactgccttgacatgcacagccatctgacggagtcgccatttgcagccattcttcgaatcttgctaaaaaacgagtcgcttggtgaagacgtcgatatcgctcaactggccaaggatactgatacctattcgggatctgacctgaaacgtgagtggtcgcggcgcgaacatcagtgggatctgcacttataccctgcgaatttcacggcagacctctgtgtggccgcggcaatggacgcgttgaaagagtcggcacctccaccttggaaactcgctcgacccggcctcgtccccagtgtcatcgcctcgtcttccgcatccgccgacgccgcaagttcaggggggatgggaggtggcggatctgaagaggtagagagggagactttggaacaagtgcaagaggagcaaggaggggacgcgggagggaaagaggtcttgccccctgcaccggcgcaggtcagtgcagggcaagacgggacggtcgtaaggatgagtgtaggggagaaccaggatgggcagggagtgggagctgctaccggagtttcatcaccgtcatcatctcctttgccatcgacatcgacggatcccacatcgacctctccatctacatcatcgaccgcatcgtcatcaggatcatcaccgacttcgacatcaacatcgacgacgacgacgacgacgaccccaccactgcctcctcggatcttgcgaaaaaagcactttaccctcgccctgagagaaatctcacccagctcggctgaaggctcgtctctggaggaactacgtaaatgggcgagcaagtttggggagggcgggtccgaacgtggaaagaagggtggatatggcggcaagtttgggtttggcgctgcgggggagaccgagggcgtcaaagaagagagcgagtatgggcgggtgagaccgggaggcgagtagccacacggtgtcggtggtggttgtggttgttgtacgatcgaagggatagattagaagaggaaattgatcaattgaaacgcggattgtttggtctccgaccaaaggcaaggaggaacacgatggtgccgaaatggataggcataaaagtgcatgttcttgaataaagacaaaagcttgcgaggacgacgccggtgcgccttttcttgttgagcccagacatcgtcgatttctttgttacaatcaccgccagtcgaacagaaacaaagcgagacggcatagtaccgggtccgtcaacgtcgttgttgtcgtctatgtgaccctcctctcctgtgaccatcgatgcgtttcacctcgtgtcgccttttgctcgtcttagggtgatcccctctcattcgagagaaaaggagggtcccttttgtccgcccgcatgcgtgagattgtaatgcgatccgtttccgagcaggtgaaaggagggtcccgacgcgtccaaaggccacatgtcaacaacaaccaagacaaagcgagaaataagcgcccgaggcgtgtgcgagcgcggcgcgtgggcagggcaccgggggagaaccgagtcgcgtcgcttccgaagaccgaggctattgtgattttttggattgaaacgcgtttgaaggattgtcttggcatcaagggggggggtaccgggtcgaggatgagcagggggaggagaaaggagggagagagtcggaaacgatttcgagtggattgtgctgatgggaacgtcccccgttgcccctgctctgtgcccgtgtgcgctgtttgtttgttcggttcgttgatcgcgagcgagaatcatcaaatacctcgaccctccatctcgacctcatcatacaatcacaacctcttctgttctttctctctcattcatcttcatcttcatcatcgacatcgactgttgaacaacacgctcactttctcggcttccgactattaacgaccaatcgactacaacgtcaaatctcttttccgccgaactcgctctctttccgtctggctacgggaatacaaacgaactcgtcaagaaaacccctcaattcacgctctctttttgctatcgaccattccgagaaacctctttctttccagcatctaatccgctccagctcccttttgacgacgacattcacgtacgacaaaaaactttacaaccatgttcggtcaagcttctaccgtttccatcgccttgtccatcctggccgccgctcctgccttgatcaacgctcacggtcagcttagccgagtcagtgtcggtggcaaggattatcccgcctggaacttggacgatcactacaaggccgcttacaagaagcaaggtgagtccagagcgacggcagtgttcgtcatatgttacgtagtcgtgctgatactgctcgacattctgttagaccctcaatatggcgaacagccccagcagaagtacactgtgagcatcccagacttgccctccctttgcccatcctttgacttcgcgacgaccaatttctgacattcatgaccatcctcctcggctcttctccagcgtaagaccgaccgtctcgacctcggacctaccgacatctttggcaagtcgatcgctaccgggggttaccaagaccctgtcgattacgacgacatttcgcccgtcggtgtgatccccgccaaggctggtgacgaggttaccgtcgaatgggaccaccactggccccaaggacaccccggcgtaagttttcttggccgcatttgcgctatgtgatcaacggggaccagtagctaatgccctctcccgcgtatcgcagcccattggtgaatggatggccaagtgtcccggtgactcttgctccaaggtcgacgctagtacgctcgactggttctgtatcgcccagcacaactttgacaaggaggccaatgactggccgaccgagatcatgaccaggaacggaaggcaatggaagttcttcttgcccaacgatctgcctggcggtgagtcgagtcgagtcgcgtgatgaccgttgagcaagttgctgattggatgtttgccgacttgtaggtgcttacattgtgcgacacgaactgtacgccttgcacaataacactggacccgtcagcggcacctcggccagtcctcaacactacccagtcgcttttgagatcgacctcgaatcctccggatcgtctttgcctaccgagactggcaggttgcccggcatgttcagctacgacgattacgagtggcaccacgacatctaccacgacggatacaacaacaagttggtcgagtgggagttccccggtgttcccgtctacccaggtggatacacgtgagtggcagctatccaacgccagagaacgatagccagccaggagctaacctcgtgaatctggcgtgatagtaccggtgtcgtcaacggaaggtcggtcaacagcggtgcctcggtcagttccccagctcctgccggatccaaccctcaacccgccgcgcctcccgcttcgagctcgaccgccgccgccgcccctgaagagtcttcggccgcccctaccccggatgttcagaacggagtcgccgtcgagcctaccgaatccgctcctaccgagtccgcccctgcctctacgtcctctgctggtgagttcgaaccgtttgtttctctttttccgcaggacattcaactgatcgagtcggacccgatccacgttttcagctccccaaaagacttgccgagtcaagacgaccaacggtcaggcgaggaggaagagggccgtccagcaggcccgtcaccagcgaaggtcgaggtccggtctgggcaggaagcactgaggtggagtctcgcgctcgactcttctgtactttttgggacatcgatgggggtttgcgagtccggtgacgagtagaaatgggaagccgggtgaatgtttcgaaggggtctgacgttgttccccgttcttgccgctcgggcagatctcgagcgggatattcgcggtgggaccgggtagtcctctggccgatctatagcccgtacccaagctacttctgtcatcgagactggttgaccgactctttatacggttccgtgatactttgtctgcttgactttaacgaccttgtcacgaatcgattcggaccgaacctgatatgaaatgggcgttgatcgctggaatactacaaacaagtctcggactgctgcttcgtttgattcggtgtacaatacgtgttacaaaatggctagatacctttgaccatcgagttaggacccttctagccactgatcaaaggtatctttgcgattcttgttgcttgtataggctgcagcgtattccaatacctctctctttcgagcgagtctctgttccggcgtgttgttggggtaaaagatgggctgggccttgggtgggggaggcagcgacacggggacgcccagcaaagtcgctttcgatgacttgttcttggaggctttggatcgcttgattcgctgcctcatcttcttgaccgctttcctctcctgagcaatctcgactgctaggcggagctgcaaaccgtccggatcgtctacatcgaacatcgtctccgagatctgagcgagcagagcttgaccacgatgttggtagtatcgatgatagagtatcagggcgtccagcgcgctctcggagaccggtctgtcacgtcgccagtccgtcaagttttcatttcgcgtcgcagaggtgtcagccgggggcgggccgtaggtcgcaagctggttgcagataccggtgagtagctcagtgctaattgcccaactcttgatcctcccaaaacgttccaaccattccataaagttctcctcatcttcggcaatgactgttcccttgtcctttgaaccagtcggatcagtgggctcgtcctgatcctgttctgtgatcaattgtacgtcatttcggtacttcataaacgcgggattcaggagttttcgcttcagatcgtcaacgacggcctgcacgttgtgctccttcaaaagctgtatcgtctcgttccatctttcaggaagagcaaatgtatctggaagacatcgcgtccagacgtgactcagcatgtgacgttggaatggttatacacgacagcttaccgatacaggtaaaaggtcggccagaaactaggcgttcatttcgtaccgcattctgatatggccgatcgaaatcgtgtgccaaattgttgtctccgggcgggcagcggcgtagaaagccatctgtttcaatcaagtcggtcagacacgtcattaccgcggacggggagacaacctcactaagctcccaagtgatagactgccatccttggactatcaaaggtgagggagattagctgaatagccatacccaataggccgtcgtagacccacctcttcgttcttcttgaacaatcgtctgcaagaaggatgaaggctcggtcggctcgtgctccttgaattcgagcaaaggttccagcggcaagtctgtgttttcgtcatcactgggtacaaagtcctctgtagagatagggcgttagtacagactcactcaacgagagggcaacacatggtggtcatacccgtgcccgagtcggacgcaacttcgtcaacaatatcctcatcattcgcctctttctcctcatccgcaaacttggcgaacgactcgacatacgcgcgctgttccgcaagctgctggtctcccgtcaactgaggatcggggaaatctggcccgtccttgtaaatatagatggtatctgccgtcgtgttcatgttgatgcgttgaagcggttggactggaattgatgagcgacctgctgaggcctgattcgatagggatatagagaacgatcaaatggaacgataaggctcgggattcgtcaaccccggaactcgggggaattgacgggaaaccttaatcgagcaagggagacaagcgagatcatcacgtgactatcgacgtggaagcgcaccatttgttcatatggtgcaccaagtttgctatcgtccgtagctccctaggtagataggtataatcgtgtgaaaagcgtagaaaagccttcatcgcacttctatgtcatgaatatgacttcggaaggcaaacagttatttcacaacccttgctatatcccagcgctcgtgagctttcgctctgctcgtaatctaggccgccagatgttcatgtgaaaggacgcgtgagacagcatgaaagaacgtctaggtatacacatgacatgtgctaattgggctacaactggtggagatgaatcggatgacgggtcgggatgagagtgtgttgttcgtgttcgtgactagtaatccaaagtctaccagccttgctcgtgatgaaatcgttccattgtctcgaccgcgctcttgacctctttctgtcgagcggttcttcggtagaagatggggcagtccgccgacgtgcacagaacatcctggttgcagagatacaaaatgctatcagctgaagtctgcaactctaatattgcaagaggcttacctgatgcagagatccttgacaacgttgacactgcgtccagagacgcgcaaagtcaatttgtaaagaggcggttgaagcggactgcaaaatgtgccggtcagcttcattccgcttcgatggggatcaagcggagagtctcacatgtttctggtagagttctcctagtctgggccgacaattctggcacacagcgccatctgcatgagataccgtaagctacctgctcggtaacccatgtgctctgatgacttacccttgttcgttttgagcggagtcttgcaccccaggcacgtgacggtcttgacggcaaatttcatcaaccctccgatggtaggggtcgcgatctgtaccgttcgggtgtgatctccgctcactgagggtcaacaacaactgatgagacattcggtcgatggattcctgcctcaatgttgcggctactcacataggcttcccgccttgtctccaagaatcggttcgaagattcgcaaaaggggtttcgagagttgattatcaagataatacttggtatcgatcggaatgttgttctcgaggacgtagagggggtcttcagacttttcgtatgccgcggcacctatagcatcaagaggatcagtcatagaacaagcagggactacatgacaaggacgacaagcctacccttgatccccttgatgatgacgtaggcgacacgatcacccaaagcaggtgcagatccttgagagttgtagattgttagcacctgaactctcccggcgttatcgcatttgagcaaatcacctgcatctcgcttcctcatacgctcggccagctcgacgtgtgcctgtttcgccgcatagtctatggtcccaaattcgagtcagatggatatgattgcgcttcggcttgacttgtaggctcacccgctttggccaatgcctttgtgatcacgagctgcgacatatcgatcttgttctgcagaagatcggcgatgacttgtttggtatatctgcaaacgaaggataagtacgcgagtagagctgccccagacaaatctgacatactcttcagcgccttgaacgtcccggtcgatcaacatcttgtgcaaacacgtctcgataaccgacgacactaaacgacaattgtcccgtcgaacagtctgatcgacacgctgtatcagcgaaatgtgcgttaaccatatcgaaccacgggcacgacccacctcgataccctttgtgtccatcttgtcccacttctcaggtttggtccaatagagacccgcataacgctttttggaaatgagcaagtacgggtagtataccttctcgaattccagcttgatcggattcacaaaggttgccgataccacatccgccgctttggcacctatgcacgtaacgagaaagccgaaagtaagcgtcgtgattcggtccgcgtgcccaggtgcagacctaccaaggtccatcgccgtcttcagatccgagcaaccgaatttcaccatgaccgaatcggtatctccgtagatgacctcggcgttatgctcgtatcccttttcgacagaaaattctaactcgactcgctgcttcgtggcttcaatcatctgacgaccgtaggctgtcgtactggacgagatggccaagcaagggagttttccgatagtggcaccggtgaaaccatacaccgagtttgctgagatctacccaggacatgcccttagtctcagtaaatcgacaaacctatgctaccccaataacgtaccttcaaagccaactgtcgtccatccaacactgcccgcttgaaggggtccttctccaccttcagatcgttcttggctcgcttacgagcggcgagcagatcctgaaggacgatgggtagtagtccctctctcaatttgcgtgtcgcaaagaagtctattggaaaggcgtattcatcagtaaaagtctgaacataacagtgcagccgatacagcgacttgccgttgttcggtgttttgacgtaatccgtcccttctttcaagcgcaggcgttcgatcgtggtcctgtccagcaaggtcgtatagcagaggttgtgggccatcatgatggacggatatagcgatgcgaaatcgagagtagcaatggggacatcatagtatcccttcactggctcaatgacggtggctccttcgtattggtcgtcggtacctgtaaatatcgggaggcgatcagcgattaggtcaatgaaagcaagtccaagaccaatttaccttcgctctttaaagccggaatcagatatcctgaatcgttggcttttcggtacaattgcgaaatgaccttgatctgctgtcctcgagacaggaggtagttgaagggaactccagtaacacgagacatttccgtgtagttgataaaacacatcagcttgtccatcaatcgttgcgggaggtatgcatcctgcatggacgggtacgagattagtgaaagctggctgcaatctactagactacccagacttaccttcaaacaatacaccgccaatcttcgtctcgattctgccgtaccattctgcaattccgtaatgatagagtgatgcacatcctccttttgctcccctaaaaattgtgcacacacggcgttcagggtatagctacgaagcttgtaatctcgctgcatgacttgaagaatatcgagctgaagacgaccttccatggcgacctgtttcgagtctcgggttccgtatgctttggatgagaagtgagtctccttggcctcggtcttgacacctgttagtcttgcattgtcagctttcgagtgacttgagccacggagatagggcctgtacgcaccgacaagctttccgaggtaagggaattgattacatttgagcgctttggcccggtccaaaaggtagggcaaatcgaagttcgcaatgttgtacccgatcatcacatctggatcgacctcggcgacaaagtccctccaagcctgcaacatctccctctcgttgtgatactcgaggacctgtgatccgacgatatgggcacaggtattgagggtgaagatatttcggataaaaggcttgctttctccttgcctagtgaccatattggcgatctggattacggggtcgatgttggcttccgggaagataccctttcgcccagcacattcgatgtcgaaactgagaattcggagtggtgcaatgtcggcgccatcaccttcaggtgaatgcgagatgagcttgtcgtagctaaagaggaggccgggtcagtctctaggtcgatctgagagcgcaatttcgtgaggcttacctgcaatccgcttcaagctgacaagaagagacttttttgcttccagacctcacggtatacattccagcaggtagttcgatccagttcatccccacgatctagtatgcagagctacgtaagccgattgaccttggtctccatctttacagcgcgacttaccttcgtgtcaatcatgaaacggagggtgtaggcaatgttgctctcgtacgtcatgacctcttgggtgaacatgtctctaaagtcgatctgagctctttcgaagagacgtaatgtcccgcaatccaggaaagccgagaggtgtatgtcagctcggtcagctcgagtaggccatggcgaagcgcagactcatctttgaccctcgggatggacctctggtctacacaggtgatcttgataaaaggaacattctggtttcctcgatatccccacagcgatttgcgcatgcacgtgctgacgtttaccacagctgcttggttacctgcagtgaccgaggcctgcgtcgacgaatggaatacggtcagccttgtgatgtgatcctggggaaagctgaatcatgctcacgttcagtcggtccttcaggtgtttgcagtcctctgtcatgaaatcctttggtgcggcgacgtagaagtatggcttgaagccgtgaacatgcagaaggaccgagttgcccttttttgtcaatccaaagagccgcaatgtagacccggtggtggcatccgtcgattcatcaatatcgatctgttgaaagactgcaaatgaggtgtttgccgagatcagtatgtgaccggtgaaaggtccagcaggagtcgtgaggctcaccgatcttgtcggcctgagcgttccatttgccaagagccggtcgaggccacgcagcactcgtttcgatatgtccaatcttcctctgaccatcagcttctccctccaaacctcctccctgagcgtactcgacggattcggcgtcagcttccagctgagccaggacctctgtgaatgagtcttgctgcttcaaggcggtatgagaggacccgtaggaagagattttttgccgtttcgcaggaggagcgtctctaaatcgcgaacacgggtcaaggtcgcacgggtgagatcgaaagtcttttgacatgcggtcctttcaaagttgtaggaatactaacgctgcaggcgaaacgttttccttcttcgaattggcgaccatgattgcctctggtcaaagtggtattacccggtcaatcgctctgcgatcagatcgttacgttggaagataacgagggatggaaccgatttcaagactatgctatgatacttggaggctgtcgagtggtaggactgtagtatatatcattgactgctatgagagatctgattgtatcgattgatcttgttcaattcgcctagcctgaccttctgatgtgactcttcggcgaatctcaaaagctcgacgcgtccaaatgaatcgcgtcgcgcgtcgacctgatggagggagcgatcgagcgatgacaaccccgggcgatcagtgcttgagcttgaaacataaccaggtccacgaaactgtctcgatctcgcagtagccagaatcaggaggagcatgcgtgaatatgttgtctttctttgacctcctcctttcagatgtcattggtcagcctcgacccattctttccaccagaaagcactagagaaggcgagagccactgtgatgcattgttgcattctacccttgtcctaatgatcttggtaacgaaacaggggatagattgagtaattttccttcacccttgtagtccgtagtcgcattcattcgcaagtggaaacgtatccggttgaggatgtcagatcaacaggacaagaatttcggttctttcgacaaggatgccagctcgcctgggtgtgacattataggtggccatatgctcaagactcaggagggattgccaacagttaaaagcacagtcctcagtggctgaaattcggatccgccgtcgaatgcgtcatattcgggatcacgtcggtccttgcgcctaccgctcgacatcagcagtgatcgcttggctcgaaacatctccgagtggcctttctccattctctctgatggacagaaatgactgccgtcatatcatgtgccacgagcgaaaagaagtgggtccaaaccatacgcatggtggactttgcccctatgcctgggcgaaatcgagcggagccgacagaaacgcgatggccgatggcatgtcctgtcgagtcaagcgcgggcgcaaatcacctcattctgcccgtcaccatggcgtgctctacagttcgccttataggccaccggacccgattaccaggacgcaatgtaatgtgcgtgtgcattgtccattataagaaggaacatccatataataatcgagaaaccagaaacagaccgacgtgaaagtcgaatctgcttcgtaccaaacgaaacgagatgacaatcgacacgaattcagacactagatagaaacagcaacacggcgcgagggggtagtacctcgctttttccgactatagaaacaagaggctttttttgaccggataggcactagagaaggagaccgcgagaagattgtccgtagggttttttttttgtaggttttgtgtgtatttttgttgacgttcatcttccgttccagaggcgaaaagatgatgacgatgatgttgagccacaagctagagcgaaccgaaatagaaaaatcgggcgatgggtcgcttaatacaaccctgccgaatgatgggggagtccccggaagttgaacgtgccattcgtttcgagaagggttcgatcaatcccgcgaaacctcgggcgcatcccgcgccctttttggtgtcgaatgccgcagcgggggtctgacctcttgtcgaggagattcctctacgccaagcgatggtatgtatcgttgatcgatattgattgccgacatggtcgacgttgatggttgatattgatattgtccttgatgtgcaggtcggcgtccagtatgagggaacgcctactcgtcgaggtccatggcttcgggaacgatggcaccgacgtcctctaggacgtgctccagaccgatcgccttgagcttggcctggacctcttcggcccatgacctccacccgcgaatctcgtccttgagtccgttctgatactcttgcttgcgcctcctgctctccctcgccgcgacacagttcctcctcctcttctcctcgatctcgcccaagagtccctgctggacgtcctcgcccatggtttccggcaaggtggcgtcccccatcgtgtccgactgtagtttcaactttttctgaaacccggccgggatgagtttacgggtcgtagcgcccggggcgacgtacgacttggtcatcgtcggagcgtcggcgtcgagcaagggtcgactcgacttcctcgtccccgtaggtccagcataaggcttcttcttgttcttgtcgttggacccggtcaagctgggtttcctcgccttgccagattcggcgtcgcggggaaagtcctgctcgacctcgatgaggggcgaggggggcgagctcgattgcacgtcggacgtcttcctgctcatgtgagggggaagggccgaagccgaggccagaggggtgggcaggaagaggttcctcggggaagccgtttgggagatgggctcggacgtaaagttggcgaaatgtccactggcatacgtcgcggcaaacatgtcgagcgtggcgtcgtggggcgacacagtcccggccaacctcatggcgtgcgagggggagagcgggccgtagttgtcagcacccccgccaatagactgggcgggttgttcgctaggcttttccgagctggtctgaccgttcgagacgcccgaaggcatcccaccaaagaggggcagaccaaacatgccctgttcggcaatggccgtcccgtcgacatcgtcgaaagccggttcggacccgaacgagtccgacctggcgacgatcggcgtggggctgacgctcccggtcccggcacttgggcgactctggtccgggaacatctgtccaaagactgggtctggggaagcctgctcgatgtcctcgaaatccgagcacaactgggtctgagtcgaccagggcgcgatggccggggtggaaaacgacgtatagagcgaggtgacggccgaagccagtgcgacctggttgaactctccgttggcgtccccgagcaatgcgcggaggtcgaacggttcatccatcggcgcacaggcctggacgtcggtctcttcctgggcatttccaaagttgaaaaacgccgaatagtctgcgtcgtccgtatgaaccgagatcagccatcgagtctaggacgtctcgcgtgcatgccagcgaggactcaccttccatctttccttctcctccaaggacggcctgatccttgtacatcttgttgttatcaataatatcatctcgttcgttcttgtcattgtcattcgatcctccgatccgtccatcccttgatccgacgtccatcccatcggttcccatcccggcgagctcgaatgcagccgccgcgatctcgttggcgttctctagcgtcatgacgctcttctcggtcgtcgtcgtcccgtcctttgactcgggttcgacctcgcccgcggtgtggtaaatgccttgcgctccgccccctaaacctccctctgtgcaagaggaaggcgcaaagggagcgagcgggaaggaatcgaacagctgttcaaaatccatccttttcgttcgtcgctgttgttgctgttgctgctgctgctgctggtgatccggtccgatcgggtcttttgggatcgagtttgctgggtctggctttcgaccgagaatcggaggtgggggcaaggtagagggtaaaaggttggctggtctggtttggccgagcagtcgagaagaagggtctcttgggatacttgttgttgttgttgtcgagttgtcttttgggattgaggggaaaccatcttgaagggtgaaatcacgagccgaagcttggaagagttgttgggtagggtgtaaagggggtggtggtaggggtgggtaaagggttttgaaatccgttccgaggtagtccaaggtaaggagctggtctagagtatattgggaggcatgatgggcgttgtgggcagagtcctggaggggctcgggtgtgtcttggggacgcgggtgtccgctacttagcaagtgaaggctggcatgatgcgagcgagggtgcgaggtacgagttgcgagttacgttggcgagcgaggggtttgcagtggatggagagttaggatgtgaagtatagatgtggttgcgtggttgttgtatgtgtgtgttttttccagtcgatggtcgatgatgagattgaggacgaatcaaagagtgaggaagggagggagagcgagtgaaaggaaagagattccgaattagacgagcgaccgaccgaaagtgaatagagagagacaaatgattgatgaaatggattcacgtgattggtcagcttcagcctttgagagacagcgagggagagataacgttgcgggggggaaagacgaggaggggagcaagagagcgggggacgggaggtcgggcaggggcgagggaatcgtttcccaccgcgcgcgcgcgacaaacgcgtgagaaccaaattcgtttcttcctctttctttcctctttcgggaacatcgtttcatcctaccgcaacgacttgagacttgggagggggagccgacccgcattccagaaggagaccctggaaagagcgaaacgcgactcacaagccatggcgactgtcgtttcctgggtagtagtctgttcctgcttgtatcgggtctgacggacggacatttctgtatgggtcttgagagtgggtggtggtctgggccgatgagcgggtcggtagtcgctgttcttgtagggtgaaaggaggatccgaaccagagaggtgtaatggattcctagagtgtgagtgaattgggatgggttataccgtgggaatgggcgagtcggggggaatgtcgcccgggaggttgttgggtggttgctgggtggaaagagcggggtcgcgaggtgtcggtctagttctcgctcagaggatagaggacgaggaagggggaagagggggatctacgaggagctgggataatctaatcctagttccaagtcagagagagatcgatgatgatgctcgaattgctgtctacattcaaaggtcgaaagcgtgatcaacagagggtcgtccctgcctctctctctctatgatgctatatgactagatcccttgacccccgctcgccgaggtcggtcaacgccgaaccggacgcgtctcggctccgaagatcagcccagactcgcaagacgcacgatgccatgactcgcatgactcgacgcagcaggctctctcacgtcgttctatatccagccagttggcgttttcgccgtgtcatcatgcttgcacgtgcgtttcagaggcttcagaggtacacgcgctcgaggtcttgttgtaccgaaagagagccaaaggcccaccttcatgctgttcgatggaggggacgaacacccctctcacacgttcacactctctgtctacgctttggacagccgtcccgatctccaccagccccgcaatgacagcttcggtctaaaacgatctttctcgcgaagcagcataagtatcggaaccacgccttttggcttcagctctgcaaaactttcgctccccgtccaatcctttccgctagagatggactctcggtagtcgttcagcttcaactagaccagggcttgctgacgattctgatcatcagaaaatctcgttttttgttctgggaaagaaagtcctggacatgcaccaacacccgaaacctgattgctattggcaacccagcctaaaaggctcggcaagctcgtcccccctgtcagaaacgttctgatgcagggtcctgcctccttccgtcctgaagcaacgactgatgacaaggggatgatgatcctcgatacgtgcggacagagtagaaccgacattcctcgtctttgcgcgtggctagaaggggtgggggatcatgggggacggatgggtatttcttttggtcgcgcggcgactagaactgtccgatcgccggcccaacgacgaggcgactttcatgcctgtgccgtctgtgatcggaaaagccaaaacgccctgcggtcaagcgtcacgctgcctatgtcttgctttgtacaagccgacatgtgcggtcaatgattgtacgttccaggttacaagtggtataaagaggcatgggaaactcggtcctcgagcctggtgctatggctacaatgctcgtgctctagaatccacctgcctcgcccggtttcgagatgacggtcggtactgaagagggagggatgaagcccacctcggtgcaaactgccgtgacaagcgctgcaggggtgagatcgtacaagaggtgtatcggggtaagatgtgtgggaatgtcgccttgttctcttgccaagagggaagacgcgtcaccttgatccagacgaggccgagtgtcagtcaatgcgacggggtacaaggtgtcgtatctcggagatctctcgcgaactcacccagctcgttgcccgtcacagcgtccaacaagacgcgctccccaaacttgtacgtctcgcacgcagcgacgacgggaatcctgttctccttggccaacatggccacggccgccgtgcctgcccgcgagtacaggctgccatcggaaaacaaggcagccgtacccagcagtacgagagaggctcggggaatgatgctagcgagcgaagagagaagtgtatagctgcaggggatcgaatgggtcgtcaaggttcgcagcaaggctttgcctgagggacgtaaagcacatgccgagtcagcgaaaagttctgccatgtacccgagcaaccgaccgaccttcgaggagtgggcccgagtcgaccacgacgacgtggaaactggcctcctcgtcgtcctccttcatttggcgccatgcttcaagcaagacctgctcgaccagtgatgacctaccaacgccgtccgtcagctccgatcatgctcacacgacctcgcaactatcagcacgacgtacctagcatacgtaacgatggtatctccgtccctaatcttttccgtagcaaacgagcaaatgacctcgccagcgagttcgattcgttctttgaggtaattgtcgatcgcttcgacaatcagtcgcttttgctgaatttgtcaagctcgtcgaatcagcccaagtttccaatgcacacataacgcccgcatcaaactgacctcgctctcttccctgatcgactcgtcagtcccgaccctgttgatctcggccttcaaccacctgatcacgtttccacctgcaacccccttcggtctgcagccgtcgaggaatccgatcatcggactgagatgagcaggcaagacccggtgcatctcgcggggtggccaagaatgatcgagaatgacctgacggaatgtcaacaagagagccgtcgtccgggcgttggttccacggaggggtggactacggggttggaaagctggggacgatgtcgtccatggagacggggttgaaaggaggagccctaatcggtacacgagcgggtgcaggtttttgtgggaagaggacgaagggatcgagctgggcggtcgagatgaagggagatgcgagaacaagagggtcgatacggctgcgatcgaggtcgtccccgtagccaccgtagttcctgccactacgcccgtcgcagaagcgcctccagtgggtcctccactggatccatcaggagccgtacgatcccctttgcccgaatctttgcccttgccatccttgttatttgtcgtcgacccagcacctgcagcggccgatggtccaggaggtcctccagcaccacctcgagcggcgacggctgcggctcgtttagctttcttttcctccttggccgatttccctgcagctgcagctccttccttgtctttgggagctttttgctttccctgagctgatgccgagatcgggttaggctgcttctgtttatcaccggactgtttcgagctcgaggctgttggtagggaagccgccgacgccggggtctgcggaatcgtaggttcaggcatgttctactagctggggtgtctggaagcgagtcacgagtcgactatcttaaggataccgagattgctgggacattgtagcggtagtcaggtaaggattattgcatcattcgaactactgcacctacctagcttcgacctctcgacattctcgtaagcgcgacacacaatgccgcgcttcttttccctctgaagtcgactttattgactcgacaaatacttccgggaccttctttgatcgatgcgtcgtgctgaaacggtaatcacgccctatcgacctggacgctgcctcttgaaacgtacagtcattgtatatccctacaggccataagatgaagaagagtctcgcccggtgagaggtgacattcatcggggcgcgtggataaagtcgctggggtagactgtctgacatgccgtgacggtcgtcgcttctggcgacttgcgtctcagccggaaccatcagtccgggtcgtggcgattgaggagataaaatcatactaggtacgagcagctgacaagatacacggagaaaggttcatccaaacaagtcgtcgtactcggcatgaacgtccctgtgagagtcgtattttcagtccggaacgactttcacgagacagagttgcaaggcaatgcggcgggggcataggttgagccggcgggggatattgttgaagtccaaccccttgcccagaggggctttgccgaaagttctctttgtaggcgtcgagccgaggtcccctgaggagtctgccgtctttgacaacccgactccaattgatcgccatccgcgctgcgttccataaggtccccattgactagggactttgaaaccgtgccgacgtccgggccttactcgagcccaaagctcgcctttcggtatggaagatgagaatctcgagcgaatccaggtccgattacacggcagtgagggtttctgccccgagaccatacgtattcgaaaatggccatcgtatggtgacaaccacttcgttcgtacgcgcacgtccacgagctctccccacctcatctcatatctcgcctcacccgctcggctccgcccgaccgacttgtctgaggttcgggaaatagaagccccgacgtgcatcgattaaagggaagaggaaggtcgtccccgtcgattcttaccactggattttgagcggtaacgatcactgggctggaggtccggctcgctgggcgcgggacgtcctggcctggcctgtcctgtcatatcgtgtgaggtggcgcgggtcataaggtcgggataggaatacgatgtcgtcgtccggacgagatgtctgatgaaataggacgggaaggataggatactgtttcaggtatgccaggcaggctaagcggatctggactatgaggtagggaaggaggcgctgttagagtgacgacacagacaaaccatcccgggatttagttgggtacagagtggtgagtgttctaatcctggtatcgctcggtgcggtcgctacgaacgaaatagggtcggccaggatccccgaggatttattcatagggttttcgtttttggcttgtattattacaggcctacgggacgtggtgtggccgtgatatgggaataagcggccgatttcgaggtgtgttgaaagacgagacgcgagacggcgggcgaagtgagtggatttgaacgccgagagcgaaaaggcggcaaggatgccaggaggggggggggagaagagagagggaacaccccgcccgccttacatcgatctgacctgatctgttcgcccggccccccctcgactctagaagaaaaaaggatcaacgtccccaccgacaagtcatctctacaagaagaaaaaatgtctgctcctgctgaacaacgaggaggattcggtcgtggtgccgccaggggtggtgccggtgctcgaggtggtacgtatattcgactccttttttttcggtcgatcgggtcgagtcgagctgggtagagagagagagggaggacgcatagggtctggaatgatgggacgagatcagggataggcaggatattgggggatggtgggcaaagcagagatggatgggagacccaagcaggaacgatcccgctgacgaggagacggtccacctgtctatccaagagacaaagcggcgagctggatatcgaggtcaaccgattcgtacggcgatcatccagaaacagctgggatacctgtcgttcgatcgatttggaagcatcaggccaggaacaggcaacaaggaggacccaggtctcaatccagaatacatggaccggcttgcccacccacccatgatctctcgctcagctcgacctgacccgcatagaccctctccttcctccgaacaaatccttctcgatcatgcccgacctcgaccacaacggctgatacgatcatctctgttcttccttcttgctattcaggacgaggccgtggccgacgaggtccccgcaaggacgaggagaagccttggcaacccgtgaccaaggtgagcttcatcgcctcctgctcgagaccgacacgcgaggacgatcgtttgctgacaagacgcctcctcgccccgctcggtagctcggtcgtttggtcaacgacggcaagatcaagtcgatggaggagatctacctcttctccctccccatcaaggagtaccagatcgtcgacaagttcctccccggtttgaaggacgaggtcatgtcgatcgctcccgtccagaagcagacttcggccggtcagcgaacccgattcaaggcctttgtcgccgtcggtgactttgacggtcacgtcggtctcggtgtcaagtgcgccaaggaggtcgccaccgccatcaggggtgccatcatcgtcgccaagttgagcgtcgtccccgtcaggaggggatactggggtaaccacattcaggaaccccacaccgttccttgcaaggtttccggaaagtccggttccgtcatgtgtcgattggtccccgctcgtgagtagtcgcgatcgccctcggttgcgaatgacgatcggtcgagttgtcgaacgctgacgccaatgtctcgtgaaccacgcgtgtcttgttgcccgacgccagcccgaggaaccgacattgtcgccgcccccgcctcgaaacgtctccttcagatggccggagtcaaggactgctacacccagtccaccggatccacctcgacccagggaaactttttgaaggccaccctcgccgccatcgccaagacttacgagttcctctcgcccgacttgtggaaggtcatcgagcccggtcagaccccttacgacgagttctctggtcacttgcaggtcggaagcaagaaggccgcttactaggcggatgtcaactcgagagtcgagtggtaccccccgtttttgtaatcgtctccagcgcatgatgatgagatgatttcgtcgtcgcctagcccctccctgatcggtcgcaattccagatcttgacccgtgtcggacgctctttgaagtgatggaacggtggacccgttggacgagcgtagtggtgacgaggaacttgtcgtccgccccgccctgccctgtcggtctcgcaaccagtctggatcccgattcgaggcgtatttagatgtcgagcaggaaacccacctatccgtcaaagactgtgaatcacggtgctaatatcgtcgacaagcgacaagagatctagctaaggtcgtgcccacgccatcggccagattgacgagtagcggctggcagaccgatcttttcgggattggaaccaaaaagaaatctcgatcggccagtgcgcgtgctgacgagtggcgggtcgtcttttgtcgtcgtcttatacgggtacagccctttggatggcgaacaagagttggggtttacgaaatcgttctagggtgaccagacctatctctgtttgaagtgtgatgctatcatcctgccgagccgtcgttcttggtgttctacgagtcgctcccgagtcgggtctcgtagtggaaaggtgtcatctgattaattcatggtcgggaaaaacagataggcgcgggtgtggagcagagcatgtgcttgatactctgtttaagctggtcgaaacgccgggcatagatgcccgacgaccagagtgctttatcagatatgaaacagcgcgtcacaaatcgacttgctctccgtggtttgcgagagggagatggagacgagacgaagcgcaatactggcttctagaacggacaaaaatctggagaatacggaccagtcaagatgttgtacagagtccccgttaaaggttatggattgaagcaaaagaaggaaaagtcgagaatgggcaagtcgaaattgttcagactggtttcatcgaggtacgaacagggaagatgaccagtgattgtagagctgcgagaggcgaggacaccatagcgccagaatggcctcttccagtgaaacacagacatgtcgttgttttggtcgactgcggaacggagaatcggagctgtacgaggccctgcgttttcgtttggttttggcaatctcgattgtgtggccttcaagcgcaatgaagaatacttgtgatctgcgacaagcacccaaatcagtttggagtgtcttgggaaagcgcgacaccgaagcacagcgaccatctggcgaccatgagctatcgcaagctattaagtgatcgggaatcagactcgacagatagagaaccaaaccgagctagaagcctggcagacagtcggctcttcggcatggttgagcgggggcgcgagtaacgcaggaccccagagcgaggagatgatgatggcgctgagcgggtcaacggggaagatgcgccagagaacctcgcgcagcgaatggatttgcgaaatatcatcatcaactctaggtcgactgaagggtgatcctgtcgccggcgccttgcatttcacgcttgtaagccagtcgtctctgaagcagtatggtcgacatgatacggcgtgcgaggctactcggatttgcttccgaaaatgtcacagagagtagggttaccttccggcaaaggggggccagctcggcagaccgcatggctgttcatgcgagatcaacctgcagctagtcgatcatccataacgtcgacctattcggcctggaccagtctgagcaccattggccccgctcacaacaaataggttcagccgaatacgcagtgaaaataacctcatggagtaagctctcgtgcgccggtccgccctcgcctcaggtgctgatctattcgaccatttccgtttgatgaacgtcctgtcccgtcccgcagctcactctctccggaatgcacaccgttgaagcatcgatacgactcgtgcttcaacgcgtggttcgaaggctacctccagcccgtagtcttgaccagtggaccttcgacatcagtctcgacgccagaatctagctcggcagcggtggaaaaacccgatcaggcggtgttgggtgatctgggtcaagaaagtctgaccgacgagaaactgggcaggtcaacgagcactaccatctcccgcccatcatcacctctcacctcaacagcaacaggaactgtctccaaggaacacgcacctcatcctgcattccgtgggggtagtctccgggaagatgacgtccgagctcatcccgacctgtaccccttcttgtcccgtcgtccagcacactcgactgcacccctcccggagctcttgcacgagtacgcatactttgctcaaggggagtacgaggacgagatcgtggacgaggaagatgaggaagacgtcgagcagttggcagagagcgagaggcaggcgattgaacaggagtttggaccggaagaggccttgttcgatgatgtccttcccggcggcgacgacgatgaagacgacattggtcgtagaaacttgggaagacaagacgaggaggtacaacaggtcgaaatggccggagggatgacagaggaggagatgagaaaggagaggtcgaggttgatggctgaggaatacgaacggaattgtggaagcctgtggacggattacagggcgtgcctgcaggtgagtcgaggttgggcctgctcgaggactcgacgagcgacttatcactaaactccttgatcccccgacattatcgcagcgagcgattgacgccaatcaacccctatctgcgctcctcgagcaatcgactacggagaacccgctggacgaagccgtcgctctggaggggggcggatacggtgctccaggctccgaaccatagagcgttccttacacgcataaacagacacagcttccgaggtctatcccccctttctttgccgtccgcccctggctgcatcttgctttgcgtttcgacattacgttcccgattttacgacccacaaaccgagctcaacccgtacgacgtgtctgcttgtaacgaccaagctggttccttttttgaaggagagagcgagcctagcgagatatacatcattcaaccggaaccgtaatggttacaggcgagccgtggtagaatccgaggatcttgcgacacgcggcatgtccatcttcacgagccgcttcgtccatgtatggagacggtcgcagtaactccgaagattctcatgacaacgcatcgtactgaatctctgtcttgcttgtctggaacgggtctgaggtgatggtcgattatcgcaatgtcagctgcccgagccgtcgatacagagacactcggttcatgcgcgtcggcggccgaccggaagactttacgcgctcaggatcatccagctgagcctagaccatattcagacgccaagcttgcaccacctgctttcacttgcaactcgtcaatcacacatttggcagtctcggtgtgctcgtcctttcatccaccgtcatacttgaccataccttggcttctcgcacgatgccggtctcgatccccactaccaatgcagtggcgagctccgcatcgcagtggcattgcatctcgcctgcgactcgaccactcaatctccaggttcttgaaatcacttcgatatcccttaccatcgccctgtccctcgctcaaccaccctcaacaagaccttctccacatgcttcgacgtcctcgacgtccaacacgaacccttcgggcagcgccacgaaacagcgtcgaccgcgacatcgagtcaagaacgctcattacgagtcggacgatgatttgacggcggtagaggacaacgatacggccggagcggacaatcaacaacacggacaaagcagcatatctccatcgccctacgtttcttcatctcaatccggaccgtatcctgcacggctagcacccttgcccaatgccaaaccttccttcaaagagctcctatcaaagggcgtcatggtaacggtcaacggtcgaccttggaaccaaattgtcgcccacgtcagcgatgacgaaccagcgacacggggcctggatgcatctggttcttccggttcttccggagacaatgaagcgctcagtagtcgggtcgtcgacaagatgttggagcaaatgacgcgggatcgtgcggtggttgggatctttggacttgagcctgggaaagaatacgagatcgacctcaaggtggtcgcgaatttcgcgggtgaaggtgaacccctacaagctggtacgtttgtggatgcaccgcgagtaagacaacctgctgaattgtattatagtcactgccaatatcgtgacccccggaggccactcgacgccaacgggtacgcggtccagagcaaactcgcttcggaatcgtggaacccgatcacgatccagctctctgcttcaacctccagcggcgacagacagtccaactcaatccgatcaggctcgggcacttctccgaaatcactcgagggaccgtcttgatacgcccatcatcccgaccgagggggacgaggtagacaacgggaacgcttcatggggtattgctccttctgcagaagagattcaagcatcacacctccgacactcgattgcggtggcacaagcggagcgggaagatctcgctgcccagcttaaaaagtcgagaagggagtctcaaaaggttgaagccggtctcaagtccgaagtcgaggcgctgaagcgggcaatggagaaatccacccttcccgatcaacgctcgagacagaagagtctggcccttcaagaacaagtcaagcaggcctttgccgctgcggagggtgccgagcaggagaaccagaagatcaccgagtcgagcagcacgtggcaggatgacgaggctgggcaaaagtcagagttcgaatccgtgcagtccgccaggaacactgccagggaggctaaagacgaggttctggatagagataagaaggccatggttgagctggacaccaagctggccaacttgacggcgaaatgcgacaagcacgccgccaagagggacaagctggccaaggagaacgagcaattgaagcaaaagctgcaggatatcgccagcgcccggagagaggtcgagaagcgcaacgacgctgtgagacagcagaggatgatggtcgaggactatgccggacctgccaacatggggtccctacgaggacctggcttggctgatcgaccttcctcgggtgcatgggattacgataataattggtcggcaaatcgaggtatgctcggtcggatgggacccggttcgagttcaaacttggtcgcacttggtcaaaacgctacgagcaacgcgcagggagtcagctttgccgagaattacggtcccagccgatcgaggcaaggcagcgtcttcaatccccgaaacctgccctccgccactcatgctcgcaatacgaccggtccgtcacccagctcggcggcggtcgcgctcgccacgcagggaattccgcgcggagccactggagggatctcccatttgggcaatcccaccggattctttgccagccaaacggaagcgtcatctgccatggccagtagagtgctacgaagcccccctacgcgagatagcggcgtgcccgtgtctccgatgatggccaacgtcacggctgcaccgttcatgccgcaatcgcaaatgtctgctaaccctgcgacctcgccgacaatgtcacatcaagatcatcatacatcgctcgtgccaccgcagttgcagcaccgaatatacctaccccgagggcgtaacgccacgtctccaggaatcgcctcgagactgcccgtcgatgagcaaggagaatctccgactacgttgagtgccgcagctccggcgttccctccactaccctcgcaaaactcctcagccacctcaacgaacccgccctctaagcagaattcgctcgctggtccatctctcgcctcgattgtcacgcgagcgatcatacccaactattcccctctattatcgcaagccgcacaacagcaaccgtcgagaccggggtcgggcgagagaggtgcagcaggactggtctccccaccaatctcccggcctgcgtcttggcatccagagaacgtcgacgcgcagacgtggaacgctgggactactaataccctttcccccgccacggaagaattccctccgctatcgccggtacaagggagtttccctggtcgagcatcacctcaccctcgtctcgacacgccgaactcgcaagcaggctggggtcggacgaccggcgggtcccacgcaccgagtcgccgaggcagtcttcgcgagaacaaagacaacaaggaaacgggagaggagccatcggtttgaacgagttctgatcgggagcatcacaagaccagataaatgtgtatgaagaaattgatccatttgacgacggacttcagcagatgagacgagtatactatttgatatgcggggatcttacatgaaatacatacacaatcgcagatttcgctgtgttgcgatcgcatcaccagctttcacgatgccacaatagtcagccggtctttgaaaacgggctggatcactctcgaatgtctgccatttgaacagttgatcatcacgcttctgatggccacggcacgagactatataacctggacgatatgccatcagcgcaagctcgacatgtctggcttcactcggcctgagttatcgtttgagccgtattccgcagcaattctgatagcaatccaagacggcacacaagggatgaatcgctcattccttaatcacctgatctgatcatctgaaccctcttgacgttctttgacgagttcgattcgctgtcgacctgcagtgaagaagtagaatcttgcacattcagtagtagtcaggacgtttcccggtcggccatgtcctacaaaatgccgtaaacgccatctcgatcgagaatctcggcggcgagagccgagggtgacctcagcttgcagctagaaactactgactagagggtctcgaccttttcatattaccattccgagtctacttagccccacgccaggcggggcgctatcgttgtcagcaaatatctagacggccataggctgcgacatagatcttatagctacttgatcggatgcatacagcgtagcggctcatatcaatcgccatgcatgagctcgagttgcgaaacggcgggtccatcgtcgtcaacccgcagacattggttgagaatggaacagagctggatcatagcgaactccccggctcggagctgcgatcgtcattcttgaaggcgcatgggttggaggaaggaacgaataccgcattctactctacctcggctggaaaacaaccacccgagtggatcgagtggtatgccttcgagcacaccctccggcagagctatgcggagaatgatgacgccgaggaaaatgtctcggtcgagggctgtcccgagctagaccagtcagtggtcaaggaagaggaagatgagctcacaagcgaaccaggcggttttacggaaaccggacccatccagaggcgtttgcttcacactcggcacctcacgacaaattacccgctcatgatgaagaagatgaagggcgggacatggaagaacgtagactttcacgagggagaagaacgggatcatgtgacggacacattgagcgaattaatgaagcggggagaacgggtgccattgcctttgaagggtcccctcgagctggtcccaggtaggacgagtcgaaactacctgaaacacccggtcacgagtcccctaggcaccatcaaaaccagaggagaagtgggacgtcccatctttctcctccatgcacagttgagcgacactgacgagatggaggattaccatgcgcacgggctgatcatgaatgacaagatgttgcgggaggctgaaagaccccagttccgagagacctggttcaattcgctcgccttgtcattggattcgccacaatgccctttcgaagtggacgtccacgtcgtggcgactctttatccttacgaagggcctacgctcaggaccggtcaaaacggtagatggacgctagcgtttgacacggaactcaagatctatggcaagcttgatgcattcattgctcgacccatgctcactccagcgctatccgaacatcttcgacgagttttgcacgtgttcttgccgtcaccgaaccgcgaactaaataccgctcgtggtgatatcacccttcaagaattctacgatatacttcaaccggcaccgctaccccctgctgatgtcttgcgactaatccagccggaagggatgcttgccaagctgaagccttttcagcagagggccgtcgcctggctgctacaaaacgagaatgcgacatcggtacacccatacttcgaacgcagatcgaccgtggatcccgagggtttatgggagaccatccaattcggagttgaggatcagaatggacccgttgagctggctttttgtcgcatgacgggaagtttgcagccgatttctccggtgatggtcaatcgcaagaagatgctcgagaaaggcaaggggaagcagacggatgattcacataacggtcattggctttctccggaagacggtctgctcagactgtgtgacgttcgaggaagtctgctggcagaagaaatgggcaagtattgggcctaggcggaattccgtgaaccgagagctaacgttatttccctgatccaatgacacgcaccgcaggtcttggtaaaacgctggaagctatcgctacggtattgctacatcccagatctcaggcgagcaaaagttctgaagccgaagtccaagccgtcaagttggaagacatggacacaggaacagacgcagaagacggcagtggttccgataagtcatattcgtattcggagcctgggtcacggaagcgtaggaaaacgggcgtcgatacgagggtaacggttgagatcgatacacaagagcacgggtacaaaggatcgaggcactgggacgacaatttgaagctttatgtacacgagatcaaggcaagttgattgagatttagttccttacatgagctaactgtactgttccacagagcacgttgatcgtgacaccgaaaatactgttacgacaatgggtagaggagacaaagaggcacgcgccaactctccgatatgtaatatacgaaggctacagcgacatgatggaggattggctcgaccacggcaccgtcaatccggcagtcagtaaacgcaagcgtgaagcagtcaaggaaccgcaggagatggctagaattcggccgcgaaaagatgagagtgccaaccgcttttttcagcgatggtatgacaactggatcaaaaggatgactactacggatgtcgtttttgtgacttacgatacgcttgcaaaggatctggacgtcgctctggctccagtcgaacgtccacgacgatctgcggcggggcctcctagagagaaacctcgatcggtgctgtctatgtgtcatttctggagggtcagtgggttgtcacatggttcacgcagcccagggaactgatatcacttgagtttgcaggtcatcatggacgaagtgcagatgctggacgctcaatccgccagcaaggccgctcggatggtgacatcactccaacgttccaatagtctggtcctgagcggtaccccagcgaagcaggcggtacaagacctccaatctgctttgcgattcgtcggcattcacattcagcctgccatctggactcgattcctcaagccaggattccgctatgcctttcgagccttgttcgctgagatggcgatccggcataccaaaaagatggtcaagaacgagacagatataccctgccagactaggacgctcatcccaatcaagatgaatatcgtcgagctgcaatactaccgagacactctgtatcgaaatatcgacgctctggccacatctaggaccggctaccgggacacggaggttttgcgtggactggtacagactttacgtgctgtctgcactcacatacaaacgaacgacctgggtaaccgaggccgccctgaagatgctcgagtggagcgaatgcgcatgggccgcgagaatggagcggtactcaaagacatggatcaagcgctcaacagaatgtaagtggacgggtgatgtctctgcagctcgcaagaggcttattaccgggtatccgacacccgtcgcaggcaagtacaagcgtggcgcgattaccatcataacgtcttcgtgcttcagtcgactcggatcaagtacgctctcgctctacactcagatgaacctaatcaatatcggaaagcaattgacttgctacgacgagtggacaaggagagcaagcgagaagttgagaccttgaaaaagacgttggacagcatggccgatacgatcgatttagaatcagacgctggagaagacaacgggagtgcggccgaagagagcaacaacgatccgacgccagaatcgtccgcaaatcaagctagggtcgtcatcaaggcgagttgatgcttttcgctatgaccggatcctagcctaacgtgttagaacttcacatctctaggctcgaatcctcgatttcaggcatttgagccacgaagccctgtaagtaaaatgtttgctctcgatccaaagctacactgataagttgccctgatgccaggtttcgttgtggtgatctgtatcatcaacacctcgatcagacacgctacgatgtcctggaagctgagagttactcagccgctgatgctatccgtcaagtgctgctagcgagacccctggcgaaatccaattcatccattgatcgggtcaaggctgtcatatctgcgagccgaataacgaaattcgaagtcttagaagtcgaggaaggtggaccgttgggtatagaaactgcaaaatatggaaccgctatcaacactttcatcgactcggccatgaatgcaaatgcagaatggttagtcttcagccattccgttacatcgaatggaagattgactaccatccttgtgaatgtgtatagcctctggaatcttcgaggcgaggtcgtcaaacggctactagagaaggtggacttcaaaacagacgacatggatgcgacgggtgaagagttcgaggcgactttacaagctcaggctacgctcgaggcatacatggccgcgtataccgatgctgtaggagatcgtcgggagattctgaccgaaggggtacgtccgtacatctacgcgctgatccgacaatccgctgaggatcgagtggtgtcaaacagaccacgttcattcggcagattgagaggaaaaagcgcaaaaaacgcgaaactcaaacagcaaaagcgatgacgatggacataccagatgaggacgaagaggaggcggactatcagaaggaaatcaaagccaaccgcaaggagtaccgcgatgcatatgctggtttccagtcgcttcaaggacttatctcagatcttgatggtgggctattctggccgatacttctgatctgctgccattctgatactcctcgtgctatctcgtagactttatcgaggcacacgaaggacgaaaagaagaaagcgaactcgcaaaaatagagaagcatcgattgagggaaatcaaggaaacccagcgtaagctctcgatgccggtcacgttcaaagtcggtgttgatttgggcatttcgccagtcgcgttgctaaaaaacctcgaagatgaggctagatccctgaacaattgcttcgttagtcgtgagacgatatcctgtgtcaaagctgggaaattgtaaggctaatactctcccaatcagaacattcggctatcttttgtgagtgggatcggctgcaccgagattaatggcatgagcgaaagggctgagcttcatctcacttacaccactccacagtttaagaccttgcaacagatcagtgatacgcttgtaagtggtctctcctgccttccaattaggcttgcactgacacctcgacggtacatgaaggtggaccccgatactgcagccgaagagaaagaagctgctgtacggctgactgagccgaaaacggcggaaagactgatggtaaaccgtgtcaaagagagaaaaatcctgatcgagacggcttctgcgacctttgctacgatggagaggcagattgccacagctcaagcgcatgctcgctatgtgggtatcgttcaaagaccaggtctatccctacaaacactaatcaagtaacctatagctcgattcgcttaatgaaaagaataaggaagaagaggaagacgaagagtgcatgatctgtcaacaggagttcgccgagatcacaggcgtcattatggtcctgcactgcgcgcaccaactgtgccagtcgtgctacaacgagtacatgcgcagtgcgccccgaccaacctgtccatgttgtcgtcttgccattatgcccagtcaagttcatcgggtagacacgcgcaagaaggagccaaaacccatgctcacaaaagctgaagccctagccgggaaaagcgacatcatctcggacgccttgaagctcgacgaactcaacgtcattcccggattgcgtcgggaaatgatcgcaggggtcgagattcacgggcagtggggagcgaaagtaagttgcgcggaccacgtcattttcggattccgctaattgaatcacctcgcctacagcttgatttcatgatcaaacacctaaaggtaagcttcagtcggcgacatcaaattcacaaggttgtgattgatctgtagtcggccttggttcggtcttaacagttttggaaacggacggaacccagtgtcaagcatatcgtgagttggcttcacgcatgcaaagtcaagatacagaccgactttagctccgctcgcctcaggtcttctccgcatgggccagctcgctagggattgttcagacagccctgacggcgaataatatcaagtggacgaccatcggaaacaaaaaggcggaaaagaatgccgtcaaagactttgctacgaatgattgtcaggtctttttgcttcatggggaacgccaggtttccggtttaacactgtgagtcctccaggtccgcaggctcattgtggacatatctcagtcggacttttcttccttgggacttcaggacggcggcagcggtggtacacttgctagaacctgtgatgaatcaaggttacgaattacaaggcgagttcttcccattgcatagcaggataatcagcaagactgacttctcgagctgcagctattggccgtgtcgacagactcggtcaggatcaagaaacctttgtattctgctacgcatgtcaaggtccgtagcagcgaccgtctagatacggagaccgtcctgaatatgttttctgctccgtagaaacgatcgaagccaagataatcaatcggggacttcgtaccggacagtgtatttacgccaagggtgtggatcagaacgcctttgacgccgaaacgacgaccgtttccggcaagaaaggaacagacaaagatagtggagagtacgttgcttgtcaagctgagatcactggatgctttcaacactaatcggtctttctcggatcagccatgatgacatgctagacctgttgctatgagcgcaaacagcggtggcttaaacgaccaagaatgactttcaataatcacgagatctggagaacggtatatactcgacgttacgatagcgggtttgttgtatgaagctcgagaccctctccaaagcgcctgatcgatgcgagtgaaccgacatagattggaattgcttccattgcaccgtactttatatggttgaaaattggatgacttttgaacaaccacacaacgagaggagttgcaataaaatacatgttgtctgaagcgtatcacgtagcttggtatttgaaagcttatttgaacatgcgcaagtacgcgagctgtcgcgggacggagtctgggtcagcattgcttgtgcataaggatgttttcgttcttctatggactgactagcagagctccagcaccagtagcgcttccgacgagatactgcaaaattgcgaatttactttgcctgtggtagccaaggcaagggggaacgggatgcaggcgcaagccgggtcagccattgcaagacgggggcgagccgagccgtgtcagaatcatcctgacttactcgatctgtgtccttagtccggcaatttccgactctatccgtgtatctacttccttgatctttagttcttgttgagaagcctcgtcacgtattcgacctggagctcagtattagcctagcacgcttcccaggcatgtcctcgtcgccgcaactcacccttctcgaggttcaagtcgagtctcaccccggccatcgtcctggtgatctcttcccgcagtctttgcttgagcttttccaggtccgctcgaagttgatcgttctcctgcttcatcagtgtcagatcattcttctcgtgcagctggagctctgatttcaattgagcaaagtcgaccttttgcgtgtaatggagctatacaagaagtgagatctaggtcagacttgagcacatccagatagacgacgacacggactcaccttttcctgctccgccttggtaaccatagtccggctcattccagtaatgctctcgtcaaccacttccgccaacgccgacatgacgccttccgcctgttccctcttcagtccttgctgagcgagtttctcgacaaaagcatgggtatcgaagtggttgtcgttcgtgggcgaactcgagtgcaaggatcttcgtctcatgctcagaagatgagctgttgagggcccggcggtccgtgacaccgatgtggcgaggtgaggtggcttggggaaagcccgtagcatgtctattggggaagatgttaggcatcaggaagggcaatatcgtcgacctatccgatcggaccacgcactaattcctaggccaaatcccgaccttagcaagggcaaggcggtagacttggacatgatgagttgccaggtgtgtcggcgaaacgttcggctcgctgattatatgatgtcgatagtaagacgtgacaatctgtgctcggtacgatcggtacaagtcgttccggtataaagcttaatgatggttggggaagctcggggcgacatccatgtcgtcccatcacccaaagtgagagatatgacgatcctagtccatcgtccgagtcgcggatctagagattccgcgctaaacgacaagcggcaaacgacctttatcgatgggatcgtctgcctttgtcgtcgaagccgacttggcctcacatccagatctcgcagtttcaagctgttccttgctcgagaaatcaaggttgctacagcgaacaggacatcgctacgttccacaaagattacgatgtgctcgaaaccaccgagtacctcttcagtccgggccgagcacctacaaccaagacggtcgcttggggtccctgggatctctttgctgatcatactcaatgctggacaagaatttgaatacaaccaaggcggctctcgccacgttatacccttgattacggtagggggatatggctttgtattcgattgacaacgactagaaggcggtaagagacaacaaaagagtagtgtacaaacagcgaacttgggtctccatctcagcctcgcagccttctggcgagcaggagcaagacgatgccgatcaggtatttgataaaccttcggatcctctcgcggctcttctcgttcttggcttccgcggcgactgaggtcgaacgcttgaaagaaagcttgtgaccgatcagagctttgaagatcttcataccccatttgggtgcgttagggtaacgaaggcgcatgaagggctcgaggctgttgacgcggtattgatcaggacctcgatcagagcgacagaaacctatcgccactcacttgctgggcacgtcgatcgtagctatgaaacatgcaaatccggtcagttgcacggcacaattgcgagcaacagagagatccaccatacctcgtcgatgggtgaacgtctcgtaagcgttctttccgtgtccgcttccccctgtcaaccacaggaacgatcagccacgagccctcgtattccgcgcaattcaaactgacagccgctctcgccgacacctccgaagggcaagcctctctgcacggtttggatgctgacgtcgttccaacaggctcctccacttaaagtgcgctcgatcactgtatcactcaacgacggactcattaacgatcgcgacacggttcaaaggcgacttccgacgacttgccgtattcgaaatctttgcgcttctcggaaaagacgtagagcgccagaggggtgggtcgggcgttcacgtattcaatcgcggcgtcgacgtcctgcgtagagcaacccggtatgtgtttagcatgtcatcacatgcccccccccccctagtcgggcgacgtaacctacctttaccgagatgatgggcaagatcggcccaaagatctcttccgtcaacaatccgccctgagattccttgtccgcgtacatcttgacacatgtaagcccgacctttcgggtttccgggtctgactcccctccgatcacgtaatgtccatcggccttggcttgctcgataaacttggtgatccgatcgaaatgaggcttgtggacgagctgggaggtggcttcggagtcgagaatggtctttgaaccatcccgagggtaaaactctcgtagtctgagggtcaacgaggttgttcaactcggttgctacttgtcggttgcaccgaatttaaactcacgcatcttcacacgctctgacgaaatcgtccgtgagctctttcggacagaggacataatccgcattcgctaacagagcaggcgaggcaatcatcatttcatcatccgggttgttttcctaacctagatcctgtcaaactgaactcactgcacatctgtcccgctccatacgctttcatcgacaggatcctcttggcggcgatcttgaagttggtactcttggtcaagatgacgggcgatttcccaccgagctatttcattcgaaacaaaaaccgagctcagctcctcattgtgtatatggcggagtgcgctcagtgggggatgaaaactcacctcgagggtgcatggtacgaggttcttggccgtagcctgagcgacgaccttgccgaccccggtcgaaccggtgaagaagactatcaccatacccaaacagtcagccatactcagctcagtcgattccatacgttctagcaacccatgcatctatagcgagagagatgctcaccgtgaccccatcgaagctccaacaatttggtcgagtggtctacggcaccgagcacaacctggtgcgtctcgttgtccatgtacttttgcatgagctgagagaggagcaaggaagagtgcttcgaatgttccgagggctgtgtaccgatcggtcacgtagatcagctggggattcctccagatgcatgcgctgaatctagggagtgtaagtggagagggagggggatctaccttgatgacaatcgggcatccggcggcgacggcgccaatcaagggacctatgttgaggtaccaagggtaattctatttgaaaaatagtatcagcgatatgtcagagggtcgcatgagagatgcgaggatgagcttacccaaggtccgatggcctgcaagtcgagtgtaggtcaactcggttcgaggtcagcgaatatgcacattgctgtcggaagctatagtacgacttgcgagtacgactcctttgggttgtttcttgactctgggatctagagaaagaagcacacatgacacaggggaggcaaggctcagcgaatggcctgtcgaccacgacaacgaagacgtcctcgttgcacgtactgttccctttgaaagccagaatagtatcccaaaacgctgtctcatccttcatccattccttcaacctctttacggtcaggtctacttcccggatagacgtccacacctcggtgaacgagacctcgtccttattcctacccagatccttcttgacgctctcacagatggcttcggcgttgtcctgcaagagatagccgatctgcttgagatagtgcattcggtaggcataaggttgacatttccgagataggtggatttgatggagcttctcctggagctgtagaccagatgtcaattggggcggccggtcaggatcgaagcagaaggctagagcgaacgcgggagtgagaacgagacgtacgggtttgatttggtcggccgagtagtcggtgtacgactcgagttgttcttgcacaagggatgacatggtccaggtatgatcttctcacgataacgagtgattctagcactatatgatgctggctgtaactgtctagggcgagttgtcttgtcatgaaagaaagcaacgacaatgtcgtttctctatccaactcccaactgctgctgccccggtaatccccccggcaaccacatcttcattttacttccgaaatgaatgaccgcagtaagcggaacggaaacaaatatgccgtaagactgtcagttagcttccgatcacctggattcgtttttgcttccgtgactgtacgaccaaaggtagagggatgatcatcaccgattgaatggttcgaggtgcaaactactcggaatacagatgaatcgcaatgtctagtatacttgtacacttgaaacccacgatcaagatctggtagtcggtcttgcaacgaaggtcaaagtagcatggcaggtccaccgtccaaatcctctagcggcttacgggtcaagggccagaagcgcaagctgagcgaagcaacacctcctccaacgaggtcggtgaagaaacgaaagtccggggcggattcaacgaaaaaggtcaaggcgggatcatcggagaaggtagcctccggtatcaaagatactattacagaaaagtatctagagcaagaagtacttgccagcgggacggcagctaccgaggaagttggggacgagacagtcgaagtcgaggaacatcctaatcccgtctcgaatgttgaacccggctccactcaccaaaccacgaacgtcccaacttcttcatcgaccacgacaaccaaacctctaccccccgtgtcggtactgcccctttttacatcgcacaaatatcgtcgcctggcccctcccaaaccatcctcctctacccttccgctaccacaagcgtcgtacacctccaggccgcgaggagcgagctcgacaggtcctaccgggcaggtcaaacggagagatgtcatctatatcacgaagaataccagcttagggagctatatgaggaggtgcaagaagctgttggtcgaagaagggtgagtttctggctcgacgccttgacgtcctcctgacatgaactctcagagcagctgaccctcgttcctctctctcctttcaatgacccggccttctgcagacactctcagatcaccctacacgcactctcagctgcgattcctcacgcactcctcgtgctacacgcgttgctcgatatcctgcccttccccaagaaacacgtctcgcacgaactcaaatcgagcagcgtcaagtgtttcgatgagaagaagagcacaggagggaagattgtttcgagcaagacaaagttgggagaaggaagcaaaaacaacatggtgcccgagagcggcgatgaggaagcgaacgactgggagccggtcttgttcgatgacgaggaacctgaaggagccgtcagagtccgggtcaaggtgggtgttccgtcattatcacgtctcactcgtttcttcgtcagtactgatcgatgtcgtgcatacctccttttcgaaagtctgcgttggaaatcatcatcaaggtcggaccagctcgatcgagacctacagcacaagagcagcagaagcagaaacagaaggaagtcgagattttagacaaggtgcgggaagagcccgccccgaaaaaagttggattggtatctacacagaagagtacgacgattgctacggtaggggatgctgggacggagccgacgttggtggacagaccaggaccggcggttgcgggcagctcgacaatccttccgtcaaagaaaaagaaccggccgtccaaggccaaacgaatggcgatgaggcaaaaatacgtcgctggaactgaagataagggcacggatgatactggaaactccgaggttgagacgggaacgcgaggagacgacggggaggcaggggacgaggaggagatgatgaacatgatgtgaaggcgcgtcccaatgatagagctggcgacagaggtgacaacaagaagtcaccaaacgcttgatcacaggcgatccaatgttcacctggcgagatgatcgtcttcatgcccattcagttcttatgccggaaagtgcttcaagacctgaccgctgtgcagaacctagatacagccccgatacccagacaatttcattatcagctattcgtagaatatgcttgccggtcaatcgcctcctgatcaacgaatcatgaatccgttgcctggccaaaggacccttactgtctggtgacaggctccgtagaaaagttcgacttagccctgcgagcgttggtcaatgatcaatgatgatacttcaatagcgagagtcagactagtcgcggctactccggccttttcacccaagttgcgcccggttttacctcctcagcataaggctgataaggctgatatccgtcggatcaagttgctgaatggacgcctggaatacgagcaaaaaccgccagccgtgtgaaccgtcttctccttgagaacgaagcgcacgcatctttcgattcggaacaagatctgaatcatggattgccaatgtgaggatcttgctacaatcgagaaactaaaaggagcgtaggctgcgagtgcgaacgagatcccgtctctctatcgtcgtacatcatctgtatccgtgcgtcctagtgagacgctcagtggagctactgagccgttgtctgaattcgggtaaagtggaggagagagcgggttatgaaacggctcatctatccagcccaaatgggcggagatggcctcgagcgtttatgtcggatttgttttgctagaggaccggccgcgccgaaagacgcgtagccgagtcggtccgatttgtcggtattgttgaggtttcggtgttgatacagatgcatgtggtattttttttttcgagcaccagcccagaatatagtcgtagaaaggaagagggaacatcgccaggaaggggtgtgccggcgcggccgaggagaggcttgatgaactatcgcgagagttgtcgaggtgacttctcatgccacgatgccataagggttgggcgagttggccctgcgtcgcccgagaagtccgagatcactgacggccttttgacggagactgaggtgaggaagatgttgctgatcagtaaacgatcgaatcactcctcagaccctatgctcgcactcaccgactggcaaagttcttgttccccaactcgtcggccccaccagggggtccatgaggctgcctgatgacgactccgtatgaagtcgctcctgtctggttctgcggagccgagccgaaaccttgtccgataacgccgaggccattcctaccgctagtgttcgcttgaccgtgaacgtgaacatcaccgctgccaacaacctttttgattccaaagtaccccgtagaggtcccaccagcgtgttgtttggcggagaattgatccccgggcatgcaaggcggggtgatcaagacgggaggtggggtgacgacgctctcggacgacgaggtcgatccggcaaacgtcaattccctcgcccgacccgccaacgacctctccaattgttgttgtcgctgttgctgatgggagcgctcgttcggaccggagccggccccgtccgaggaagccgagctcgagctcgccgaacccgatcgaccggtcctcacgcggttcttgtcctcgtcggccgtgttgttgacggcagaggaggaagatgttgagctcgtctgagaagcttgacgggggacgaccttgttcccgaacacgccgttgaaattgaatcccttggcagcgggctcgacgggtccagtagtactcctcccgggagtctgggcgggggagacgggcgtctgttgcgtctttccgagagaacgccaagtagcggcctgttcgtgctttcccgaggcgttcgaagggggggctgatccgaggacgctggaccgtttctcacccctgctcgaagtggtcgggtgagggggcgtcatgatcccacccgggttcgatccgtgggtttgggtcgacattgccgttttgggggtaggcgtacggacgtcgttgttcccgatagagagattggcgaaaccttcttcccaaccgttcgacccggtaccgttgttgctgtcacttttgatggactgaaatccgggaaaagacagccgattggaagggttcctcgtggactgttgctgctgatgctgatgctgctgttgctgcaacatgaccatctgttgctgctgttgagacattaactacggatcacaccgcaggaacgaaaacacagtcaaaatcagccccgttccacagcatgatctcacttcgactcacgctagcttgcaacctcgcctcttgttccctcgcggcacacaacctcaacaaccctagctccatctcattcaaccctcccatccggctcaagacctcgtccacgctgatctggttcaagagggcgagcgactgagcttggacgatcttgctgttcagcgcgttcagcgaagtctggagggatgcttgtgcggagagggacgaggcggaggtagggggcgggaatatggtggttgggctggggctgctcacgacgagccgggagggtttggaatcagcaacccaaaagctgacctcgctcactacgactcgcgactcgtcccactcctactactgtgtgctgtcccatcatcgccacagtcagcgtcatcatcgaattaatccactctctgttcatcctagagagtcgtacttgacaaaatccacatcaggtcagagacgtctgcgtctggaacatcaacaatccaccaccttcttttcgatctttttgcgcggagagcttctctcgctctttttccggtcacgtaccccgctcgctcgtgatcgcgtctctctcgctcgcgtctctcgttcgatcttgggatatttcttttgtcgtcccggctcaccaataccgtggccacccagcaaacagtaacttccatcgacatccgatcatcagacgccttggatcctgactaggatcgtactgggccacaagttagctagtcgacctggccatccgctcttctcaaatacccggccaacgtagacctcctgcaatcccggatcgcacaaccagccagccagctcgtcagcttgctagctcataccggaccctctcgtcaacgatgatccgttcgattctccgtcaagtggccgcaccggcagctgccgctccgatagaagccatcacgacctttttcgtgctcgtcacgttggtctactttcagttgttgcatgcgatcgaggggagcgaattgtaagtctctcgcaaggctagctgggggatgacatggatcgacctcgaccgagcgagggaatgatgctcattcgtcaggctgttttctctctcagctttaccttgcctgatcattccacgatccctaccgtcccatccactttctacgtccccaccgcccacctttccaatccgggcacgtcaataggcaaatggacccaagtgatagacctcgaacaacccgacctctttgctacgccgaccttggctgatcagctcgaaaacgtcctcgtcgagcgtttcatcgtcgccgggtctgggaccatcgcgccgacgacgctggacgagaaactcaaggccctgaggttgatcgtggatgttcgcgaggggacgaccgtaggctacacggacgtgtgctacaagtccaaacactctcacgtgtcggctccgtctgacgggtgcatggatttgcccgtagagaaacaacaggtcattgcgggcgagtcggacgtcgtcgtcacctttttgttgagggacgacccggtcggcaggaaatacctcgagacacttcgagaactgcaacacgtcaccttgggggtggacgctacgagctcgatcgtcctctccatgctcccctactcgagcgcctcggcggcttccggtacgaacaagccgggcgaggaggaatcgacggcgagatcgagcgaatcggtctttagcctttacccgtactcgagcttgtccatctttacgcggacgaacagcgacgtgtttaccccatctcaaaggagggcgtataggcagcaacagcaacagcatcatcatgcccacttgcccttcccttcatcctcgacctcggcaaaggaatccgccgccgtcgcctcgtccagccctgcctcgaacgtcccgggcaaggagaccaacccggcccgtcacatcaagttcctcgcctacgccctgcgtgccctcgtcacccgattctggatgttggccaagaatgctgattcggccgacatctttgtcgtcctcttgggttacgtcttgatgcatttcacgtttgtgaggttgttcttgaacatgaggaagatggggagcagtttctggttgcgtgagtgttggccgtacagggtcaggtcgtacagtcgaggaaaaaggctgatcccggtgtcgacgggtctttctctgttgtcttgtttttggccgggattcgatagcatcggcgacgttgatctcgtcgacttttggattcctcttggccatcttttcggcctacctgctcagcttccccgtcgacttgatctcgctctcggaagccttgccgttcctggtcatcacggtcggattcgacaagcctttcctcctcgcccgagccgtgttcaataaccccgagattgcgcccgtccgtgcacccctcgctgcgcccgtgcccgatctcagcggggaaaagtttatcgcaaaggccaaggccgcgttggagaagaaggaaaaggctaggaaatcgggagtccattcgcaggatagcaaccagacccctcagcccaacgggttcgccaacgatctcgacctgtctgcgctggaccgcgagttggccgtccacgcgaggattcagagggagattgctgaagccaaggatcggagtatccgatgggccgcaccgatcggggccaagtttatcgtcatcgacgccgtgaaaaaggtcgggacggggatcgtcagggactacgccatcgaggtcgccgtgctctgtctcggaggagccagcgggatcggcgggttgaaagagttttgtcacctcgcggccttgatcttggtcatggattgcgtctgtctgttcaccttttacatcgccatcctcaccgtcatggtcgaagtgcacaggatcaagattgccaggaaactcaccccggcaacggcgaaccgacaagggtccgtttttgacgcgcctaccagttcggtcacgccgtcgtcctcgaatggcttggtccctacctcacccgtcaaggaggattcgtccccctcggtctcgtccttgttgttccgacctagcgaatggaagaacgccctgatcggtcaaaagggatccaagctgaacgagaatgtcagcgatctcgcaaaaaagaggagcccggctgggaaactcaagttgaccttggtgagtggggcgctacatgttgggtcgacatgtcgattcgcgagactgaccgaaagtgtcgtcgcccgcgtcaacaacagattgtggctttcctcgtcctccacgtcgccaacttgtgcacaccgttgaccgaacataccgcgctcaagcgtaacatcgctcctgctggacccttgcctgtcaacaaggacctcgcctgggttcaaaagcacggttcagtctttggggtcgatagcaagatcaccctcgaggtcctgccggccatccatgccgtcgctttcgcctcgaaccctgctttgcaatcggtcgatctcgagaccggtctgcccatcgaattcaatcgaagcaagggaatggcatcgctcgatcacttcatgtccggctggaccagcctcgtcggagatcccgtgctcagcaagtggatcgttgtcgcactgtttgtcagcatcctgctcaacggatacctgatgaagggaattgctagcggttccgcgcccagtcaatcgaccggacccgtcgccgtcgccgccgccgctgccaggctcgtcggtgccggtggagtctgggacccgacctcgatgaaccgtgattccctcaggagccgtcgacgatggagcggtggtatccagctcgaacgtttctccaacacccgtcagaccgagtcggacgaagagggcggcgcgactcatcaggacaagctcgatcacatcaaacacgctgacccggtcacgcacaggtctcggggcgcttccgccggctcgacgcctgtacccaagatcaaaaaggccgaggacgcgatccgatcgggagaggcgacacctcgttctgacggtggcggcaaggtcaggcctgaccccaaggccgaggtcgggcacctcatcgtcaatggaacacccagagcaccataccctacgaccattgtcaccgataccgatgccgacgatgacgattcggtccgagaactccgtttgtctcacatgggtcgacgaagcttggaagaatgctgggagatttacgccggcggtctcggcgcctttgacttgtcggacgaagaggtcattttgctcgtcgaaaagggcaagatcccgggatacgggctcgaaaaaggcctcaaggatctcgagcgcgccgtcaaaatccgtcgtgccgtcatgtctcgtgcttccgttaccaggacgctcgaggcatctgaacttcccatggccaactatgactatagccgtatcatcggagcatgttgcgaaaacgtcgtcggatacatgcctcttccggtcggaatcgctggacctctcaatatcgatggcatttcgacccatatccccatggccacgaccgaggggactctggtggcatcgacttcgcgaggatgtaaagcactcaacttgggtggcggtgtcacaaccgtcttgcacaaggacggcatgacccgtggacccgcagtagaatttggtagcttgcaagaagccgcatcggccaagatctggatcgaggaaggtgacggtttcaaggtgctcaaggcggctttcgagtcgacctcgcgattcgccaagttgatctcgctcaagtgcgctctcgccggtcgaacgctctacattcgatttactctgaggactggagatgctatgggtatgaacatggctggaaaggcttcgaacgcctcactcgatgcgttgtgcgagcagttcccgacggccaaggttttggctctgtctggaaattactgcaccgataagaagcccgcggccatcaactggatcgaaggacgaggcaagagtgtcgtcgcggaagctatcattccggggagcgtcgtcaaatcggttctcaagactgatgtcaagacgctggtcaacctgaattggaagaagaacctgatgggctccgcgatggctggatccattggaggattcaacgcgcatgccagtaacattctgacggccatgttccttgccactggtcaagacccggcgcagaacgtcgagagttccatgtgcatgacgttgatggaagccgtcaacgacgatcaggatttgatgatcagctgttcgatgccctgtatcgaggtcggaaccgtcggaggcggtactattctcggtccccaattcgccatgctcgaatttttgggcgtcgctggcgcgcaccctacggaacccggtgccaatgctcgtcgattggccaggatcatttgcgctgccgtcatggcgggagaattgagcttgatgtcggccctggcagcgaaccagttgatttcagcacagtgagtttccaggcccggacgattgtgggacggctttgacgatattgactcgagcgtcttttctctctcgtagtctcaaattcaaccgaagtactgctgcaacacccgcctcgcacacccctggcgcgatgacacccgctctgacacccttgaagaaagcttctgcgacgttggcgcccatggcgacatgatcgacggagattatttcgacacccctgcctatggtgatcaaacacaaacaaaaaagaatagcgatccgaccggcacgaggtcatccagatcgtcccttcctctcaaactcccctgcacagttgcattaatccggctcggcacacaacaattgcatatgtcctcatcttttccgatcaaacctcctcaccacacacgacaaatggatagtatcacaggcatatgttacctataccttcttcacatgtacacgacgtctgcgatcgtgagcttgcttgctcgggacgctttttgtaatggtatatcatccttaatctcacggtccaaatggctgaccaacgggacaacaaccgccttccatcccatcccggtcgcgactgctggaatccatccatgttcgacgcgtgaaagctttcggtcgcgactagctttcaatttgttcaagtttggttggatgggtcaggtcacatcgccgatcgttatttgagtcaatggctattgtccatgtcgtaggtttggctatcagagtgtgcctataatcaaccgaccctagccatctactacactcgagataacgatatacctttggtaatcaggcctgcggaagtgccatcataatcctattattgaaagaacccccttgtgaggccgaacttcaactttcgaggcacactcgttgcagccggcgaggagaccgatcgaccccggcaacatcggcgagttcgttctcgaaattcgcaaagctatagctaggcgttgaagagccaacgtcttcatctggcttttcgctttcaggtttggcaaatagaaggaccatccctggaaaccgaacctgcccctatcgtccacaagatgtcaaacgtgagtcacgaatcgaccgtgctatgcatcaacagtaaagtgtgctgacgggcactgtaatctccttagatgtcgtcaaaggattcccgaaccaatgctcttgaagagctgaaggccaagcgattacgcaaagctgcgaatgcagcgggaacatcaaagcccgacccggacgacgagatacctggctctcccccacctcgtatactcgccccggcttcgtcccctgctccaggtcgcacctcggtatctgagaccagtccgagaggtgtcggttccaaattctttgacggacagcaggatactcagcgccgtcatccaggaaagagctacaacgatgcgttcctcggagatgattatatcggttcgctcaatcggagcaagcccgcaagacaggaaagggacaagacgactctgggagagatgttcaacatgatcgctccgacttcgagcagtagcacgtcggcatcgaacgctccttcgccgatgtccagctctggaatcgaccgggacgaaaggggtcaagctgtcaagaagcgagccatgacgtctcgtgagggttccgagttcagcacaggtctcgacatgtcgggactcgatgtcaacacgcgaaacggcagcccagcgacccccgggggtttatcccgcacatccagtgtggacatgggtactccaggcaagacatctacatcgagcctcccggagaccccggtcgtggccggaggtctcagtcggttcaagcatcgtgtcgctgtaggaagtccgactcccagtccgcgatcttcgcaggtcagcaatccatctctaggcttggtgtcttcgtacaagaccctctggcctggtctgcgcgattcgcagatcgagaacgccatgattgcacacggatcaggagatcgaaaatcgttcatctacagacttgattgcatggcacaagggagaccgtaccatcccccggcgcctaaagcgctcggtccgggtggaaacccatccgctgcacgggcattggcaaacccaacaccgaacggtgataaagtaccgagttatttgcccaagacggatcagcacatcgctgcgcaagcagctggacgtgccgatatgaagcaaaaatctgccatctatgcaaacaggcgtgtagacggtgcgaacggtcgcaacccgtcgcctgtcaagccgtccgaggctggtgccaagcggagaagagcggacgattcgggatccgatgcagagtggtctgatgggagtgatgtcccgggtcgaaaaggcaagaggagctatggcgtcgaggtggaagacatggacgagtcgaacgcgctcaaagttttcaacacgtgcgagccggcggaattgaccggatcgatcggcaagtcgtgggaccgtttacaattcctgtattcgagcgttggctcacttttgactcttgcgatctagtctgctcggaggagcaagccaagattatcatatccctccgtcctttcgagtcggtccaggatctgcgtactcgcttacagaaaaaacgaggcgtttccgtgggtctcttcgagcaatacatggaagtcatgcaggggtacatccaggtcgaccgatgcctgaacaagtgcgaaagcatcggaaaagaggtcctcgatgttatgcggttgtggtcgggtggtcacaaaggcggcgagctcgcacgcagtagaacatcgtcgcctgagggtggatctcaaaaggcattgggactgtcatcccaggataccggcatgcacattgcaagcgtagacgctgctgcactccgggatatggccgataacgagatggacgtcaagaagcggaggatactgaaatcgtacaagtctgagccccctgctggactggccaagggggtcaagctgaaagattaccaagtggtcggagtcaattggctcaacatgatgtacgaccggcaattaagttgcatcttggcagatgaaatgggtcagttcggttcctatgggcggctcgttttctcatcctctcgttgatcaagttttaccccttcccatgtacaggtcttggcaaaactttccaggtcatcgccttcttggctagcttgcggagtagaggaaagcgatttgctcacttgatcatggtgccgtgagtgcaacctccggccgaggcggatagcctacctgatatctaacggtggcctcccgacagttcgtctactcttgaaaattgggttcgagagttccaacgctttgctccggaaatcgacgtccagacgtattacgggtcacaaaaagaaagggaagagttgcggtatcaactcaaggagcaacatcgcgctggcgaattagaggtcctactgacgacatacgatctggccttccggccggatgatcaaaaattcctccggaaaaagctggacttcgaggcaagtcagcttttgatctaccaggtcaaagtacgatctgcatctgacatcatctccaacctccagacttgtatctacgacgaagggcacactctcaagaattacaacagtctgcgatacacgaaattgatcgagattcgacctcgctggcggttgctgttgaccggcacgccccttcagaacaacctgcaggagttggtggtgcgtttccgatggcaaagctcatcttggtccaagtacagggctgaatttgttctgtcgacagtcgctgcttaaattcatccacgaggatatctttgacgacgcagaagcatcgcttcggcagattttcaaggtccacgccaagggtgtgaacaatctactgtccgctcagagggtatcaagagcgagaacaatgatgacaccgtttgttttgcggcggagaaaggctcaggtaaggtcgagcttactttgtacagacgtggctttaataacatacctttcggtctcgcccaggtcctgcaagatttacctgtgaaaacggagagcaaagtctcatgccccatggagaagaagcaggaaactctttacaacagtattctggagcgttcacgcgacgttctcgtttcccagaccgaggaggaactcgagcaggctgcactgaacgatgacgaagatgacggcaagcaaaagacgaaggccaaagccaagaaggaccaggccaagcagaaagcgagcgcgtcgtcaaacattctgatggatctgcgaaaggcggctatccatcctcttctcttccgccggatctacgacgacaaggtcattcgtaagatggctcgtgactgcatgaaggaagaagaatttatgacttccgagtacgacctgatcatcgaggacatggaagtaagttttatggcggatcgcgggcaggagcgggtgctgacctattgtgtccgtagtacatgacagatagcgaactctacgactttgctgttcgttatgatgtcagtggcacctcgcgtacacttcttgcatggggtgaggcaactgacgaattacctcgtgcagagcgtccgaaaatacgcgaagctctgcgaagacgcctttttccaatcggcaaaaacagctatgctgattgaaaagctggagcaatgcatgaaggaaggaagaagaatgcttctcttcagtcaagtgagtcatcacggtgataaattaatgcaaaggtagaggcgctgaaacctgtaatggcgcatctagtttacccaagtgctcaacatccttcaggtagtgctcggcaagctgaacacgcggtacttgcggctggatggaagcacaaaggtcgatgagcgtcagaccatggtggacgaatttaccgaagatgaagacatcaaggtcttcctgctatcgactcgagccggtggtatggggtgagtcacaatcgtttcgggtaccatttcgtcggtcttttgagctgaccctcggacgtgcttagcatcaacctggtcgccgcttccatggtagtcatctttgatcaagactttaaccgtaggttctcatacttccgtaatgtgttttttgcgggttgtcttacggaatccctcatctcagctcataacgacaagcaagccatggatcgcgcctaccgaattgtgagtcaggcaacccttacgaagcgagaaataacctgtagtaccgcatactgacgatacgattcgtgcagggccaaacacgcgacgtgctagtgtacaaattcatcacgaccgataccatcgaggtgagtcatctatcctgaaattgaaccgtgtttttaacccgagctgactgccaccctccttgccctatctctttccgacaggaggagatctttacgctgggagagaccaaactccagctggataacgctgtcggcggtatcggtggagctgtcgatgcggatggaaagcccgaccagcagacggccaatgacaccaagaagagtttgatgaaaacgatccggcaacgagtcgtcgagggccccgtggttagcaatgagaaggttggggacatcactaagcctcaggatggcgtcaggacagaggacgtggtgatgacagcattatagtaaaacatcttgatctcggcttcaggtcctattgtgtagcgtatttgttggcatattggcatttgcattttgcatttcgaagataagagtatatgttctgattgcaaattgacgtcggtgatgcccgatgacgaatttcgagagatgatccactttgtcaacaacgccgaaaggaaacgtttggctgacaaacacgtcattcaccggccggccacatatgtgaacctcttagtcttcgtccttccaaggacagacgacccagatcactttcttaggaggaatctatcgcaactagctcgaacttggtcacacctgtgtaagaaaagctcctgggactccaaatatgtcgtccgaaagacctactgcgcctgcctccatctcgtccactcgagctcccgggtatgaccgctcattcattcctaagcctgctcaacctatcggtagcgtctttgaagacgttgaaaaatatcctcagaacaagactgtgcccaagctctttcaggagcttgaaatccgtggcgtcaactttcacaatcggatgatggcggtgagtccgtttgtctgcacatttctgcacacgtaatgatcggactgacgatgacatctggcgcttctcaggctccgatgtgtcaatgtaagctttcgttcactagtgtttcgagtgcactgttctgatctcgcatcacggtttgcttagactcgtcggataatggtcacgctaccgattggcacctcgtccacctcggctcgttggcagcgcgaggtatcggcgggatctgtatcgaggctacagccgtcgtcccagaaggccgagtgagttgagagtcagcaagctgcacgacataccagatctttactcgacttgctccagatttctcccgaggacgccggcctttggaccgatagccagatcgccccgctcaaacgtatcgtcgaattcgttcacgcgcaaggtgtacccatcggagttcaactcgcccatgcggggaggaaagcctcgacgcagagtccctgggtccaagaacgagctagttcgacttatgcgagtgaggggaagagcagcgtacctggtggacacgtcgctagcaaggaagctggtggctggcctgacaacggtaagctctaatcatacctggcaaccattacgtattggcgagaatctgatgcttcgcgtctatattagtccaagctgcatcagccatccccttctccaccgagtaccctcagcctcatgcgatgaccacggaaaaaatcgatgaattcaagaaggcattttcggacgccgttgatcgatgcaaccagatcggctttgactttatcgagattcatggtgcccatgtgagtgtggatagagcagggggggcatgcaggaagctcactttaaggaagcgcgcagggttacttgttacacagtaagaaaatcggcattgcctgcgttgacatagccagctctgatgctttgtggccactcaacagacttcctgtcgccaatctccaatgaccgcaaggataactacggaggctctcttgagaaccgtttgcgccttccgctcgaaatcacggacatcgtgcgatcaaagtggaacaagccactgttcttccgtgtatcggctaccgattggtacgaagggactgagcgtgccgatgacgccaatgtcaaagacaatgaaggtcacggagaatggcgattctggtccgtcgaaacaagggttaagcctcgtgcggcccgtgatggctgacatgctactcatccttgtaggggtctcgatcagaccaccatcctcaccaaacaattgcgtgaccgcggagtcgatttgatcgatatcagctctggaggcaattacgttgggcaaaagattcccgttcgacccggataccaggtgccctttgccgctcacatcaagaaagaggtctctggaatccttgttagtacataggagcattccagatgttttcacagctcacccctgcttggaatggcgttcataggtcggttgcgttgggctcattaccgaggcaaagcaagcaaacgacatcctggacaaggacgaagcggacgtcatcttcttggcccgcgagctgctgaggcacgccgattttcctttggcttgcgctcaagagttgcatgtagccgtacaagccgcgccccagtacgagagggcttggacgaggatgtacaaatccgctgataaaaagtagtcggcacaaaggacagatcacagtcgatcatggaggttgtcagcagcgaaacaggtcccagatgtatgcactcgatggaatatgatatatgagtccgcaaaataatattaatttggagagctctcctcctgatctgtagcttagcagggcgtgagtcctatatttaccagtcgctagcatgagtccggtcgctagcagcggaactaatatgccgaggagtttcatcgccctgccttgaaagcgcagacaagggcagcaccgcctcgtcgtggacttcccgtttaaggtacacttggtcgccctgtgaggatttaaaaccagctgtaagcgagatatgtccgaactcgatttttccgacagaatcacctccaacggggtagtcgatgatatatgagaagtattgaagtgctttgtcaaacaggcgagagccgtatcaaagtcgatgtgcctgtgtgcatactcggttagcggcaaaaaacacgaatgatccggtctcatgctcacgaggtcaacttgtaacgcggttggacggataaggtgtgtcgggctggagaccagatcgaatcagcttgtcatattccgcatggaccggaagatagttgactgaccatcgacggaggagtcaaatactgcgtcggagtgggctccctcggaagcagccaatctatagttgcatcccgtcagtcagatgatcgccagtctgtagtctcgccaatctagccggactgaccgtatggtgaacaccttattccccgaaccagtgacacgttcataaagctcgactgttgcgccaaagttgtcagtatgcaagcaagcaagtgacgaaatttactcgggccatggactaacgcgtcaagtgacttgcatagtccaggtgcggcagcgacacgggcaagagcggtaatcccgaagtcaagagcaaatgcatgaaggtttgaatatgcgactccctggaaaagtagattaacatctgccttagctagtgcaaaattgggcttggtgggatcgactcacttggtaaagaagaattgagctgtcgaactactggtctccttggcctcgagaaggatattgacaatctttcgcaggagcgggagcgatgtcaaaacaccgatctcctccttgtctgccatgtcgatcccatattcctgaggtgcaaccaggtcgaatagcgctttcgctcgggcgtataattcgtggagtcctgtcgcatcgggatcagcagcctgctgcgcttattcgatgggcaaacttactcctgtcaggattggtttgaccatccttggtgcgcacgccttccggattaaagatcgagaacaagaattgacgattactaataacgggtcaagatcagctctactaaataggatcaccaccgtgtcaatgcatattggacctactgaattccgtcatgcttcagcgagtcatatagctcggagatctgggagacgcgatttcaaggtattagcggttttgatcaagctcaatcgcgggcaatatggagcgggaactgactctagacggatcaaacttttcgatcttcttctcatcaaaatcgtcgaacagcttctgccatcgctcataaacgatccgggcatcatcgccggaacaccatctctgaggcagcatcttgtcaacagctccagattcgaagttgcgttgcataatctccctcaactcggacatttgttgaacggtttcctggtcagccggcgttcattagtcagatgtaggcttcgggtggctcgggaggtgaccataaagtctactcaccttgacaacttcaaatggctccttcttcaatgacttgggccaggctagctcagggcgcttttcggactcgcccggacgaagaagtacctgaaatcgctacagcatcagatcttgtcgcaaaaggcttgaccacgtctcctggttcaaaggataatcaccttgagcttctttttggcctgatccgtgagctctttcgctgcgttgttgtcgtcgagcaggtcccgtcgttggatcaaatgctcgataagaggcgtgttgtcttccccatctggttttcgcagaccgccagtcatgtttgaagcggaagattgctctcgaccgagcaatgcccttgcaaagatctctgcggtgttgacgacacgtctctcagatgacgtgtagatctgtacgttgttcagcacatccttgtctgtatggttatacaacggtaattagcatcatatcccgatcgatgggttgcgacagacatactcatgatcatgagatcctatcgaagcgacaacgagataagtttctgctcgcgaagacatggaagagtagccgacttgcctttttgaaggtatctccgaggtctcgtgcctggtaacgcgcggcatgggtgctctcgcctccccacttgacaacaagctggagcttctccaatccctcggggattgcttcctcatcatccatctcttcgggagtgacggcggacatcgactcgtgcttggcgctgagagcttcttgtgtcttgggcaaggctggatcgatgggcgataaaacgggagaagcgacgttcgagatcgactccaactctgggtatggagacgtgattccgctgcggtgcttgtccttggcagaaaccgatgatttgctgggacttccgggtgccaacatgggctgagcgtgtccaggagtaggcgtgctcatggagcccgactcctcgatccactctttgacacgttcgcgggtctcgctgtcggtcacttctccgtcgtcgtcgttgctttttttctctctttctttcttcttgtctttgtcctttttcttgaagaaagcaggcttgagctgagccttggttcccggcaaactcatcttcttgaccagcatatctttgagctgctccagcttgttgactgcctctggggcacattcgagctttagtgcctcttcaacagcggagacgataaagtgaagctgtcccggtccacgcaagatgatctcctctcggtaaccccgcagaagacgtaagaatggcttggtccaagcctggttggcagggaaggagaatttgagcttcatcttgggagtgcggtcggcgtgtcggaatactgtacagcgccgcgtaaaggtcatttgtggtgttccactcgttttttgaatcccgaaagcacatacctgtgaccgtcgctcgaagcgtactggagctgaggaccggcatctcgctcttggtcttgctgacagaagcgcctccaggagcggcgacaatgtcggcaaacttgcgtttcttctcacgagctgtctgacagacactggacaatatctcggcggccttgtctattggattgaaaatcgaacgttgttaaaaacaatcgaaacggatacctcgtcgatatttaccatagtaagactgtgcgaagagccgacaagcgtcagtaattgactcgacgacgaccggcagaggaccggctcacctggttacccttgacaaagctccatccgttgacatcgatgatcaggcttctcctgctaccgtcatcatgggtgcacctgagcagatcgaacccgcagaccctctgaccgaaagcttcgacaatgtctttagcccagcctttctcctcgtcatcgagttgggtgatgaatcgggtctctttcccgtcggcgtttcgcctgacaagaccgtcgacgactggcgactttcgggtctctgcgtgggaaaaggtgggtccgacagtatagatcttgatgtcttcggcattgtcaacgttgatgaattcttcatagatgaacgagccggtcgtccgggggtgaacgagattggggtcaaattcggaagatttgtttccaacctgacaggcagcaaatctcgatcagctgttcggccgcgccgtgtctgtgcacagtgtagcaccgctaacctttcggaagagacgtcttcctccaccgcctcggaagtagatgtagacattgtggtcctccccatcgacgggtttctctacgaacggcttctcgatgacatgaccatcgacgatgatggcatcgccatcttcccgaaggatgacctccttgccccgagggaccttgccgtacttcttgtccccgttgctgttcctcgcgcggctctggacccatctttcagggatatgaggtggaccccaggcgtcctccccttcacccagaggaccggggagtactaatcccatgtccctcctgaccctctcccggagtcttccgtttacgcggggaccgccgtctcgagtcacttcagctcgagcgggggtgggcacaccgatgtggtctagaatggcgaggacgagtcgacggtcccaaagcaaggcttgcatagcgagcgaattgatacttataggaggaggtcgagtagggttgggcaattgagtataggcgatggctttaggcaaggggaaatcggtcgaaaagaacgagatgaggacatcgacggggggccagtgtgtgatgtctgcaaaagtcgagcgaggaaacgttgagcgacagaacagactatgatgaacaaatatcacactcgccttcttcgaggatgaccatgtctccgaaaagcttgacgacgactccgcccttctctatctggacgagcctggtaagaatctcccgcatagccttgcttcgagccttgatgtccatagcgcatattcccaagacgacaggttcctcgtctagccgaggctccttcttgtccttctgaaagtcgggaggtgccaagaaggatttcccgagtccctccgaatcggtctttttggagccagcggggttgaacggggagatggctcgacccaatggcgctcctgcctgaggaggatacggtatcgcaaacggcctgtattgattaggatcactaggcgaaggagcagcattagctccaccacccgaagatggtggagataccatcccgggggaagttgtcccaagtgctccgatcctagtgggtacagcaatgttgatagctgttcccgacggcgtgcgagacaaggccggagatcgcgcgttcgaacgagatggagacggcacagtgtctctccatgaagaagacatggcagctgatgcgaggctattataaagttaataggcaagggtatcgattgtgtaggaacagccaagctcgaggttctaaccagtaggtagtgcttttgttagggtggctctactttggctgttccgcgtccaggtcgagtgcgggtcaccaaatcgcgcagatccgaaatcgtaagagtcgcgcgcgagagcacgttcatattcatggcgccaaacctgttcaattcagaatgattacaattcacctcaaattcgttttggaaagtctgtgtcccatagtggtctattgggtcggccttaagttgattaagttatccgatggctagcgcctcgcaggttcgaaccctgccacagacaaagtcatctttttgcccttgtgtaaacttttttattctcaagtgtcccaatgtgacgtgtttcactcattggaaccgggctctcaatatcttgaagctttttggattctcggatttgaccgaacggcgacgggtcggtgtcgcgttgccacaatctacggggtttcgatagggaaacctcgaagccttcgtgcgtagccatcgtcgacccacaagtgtaataacctgtccaatttggtgggagggttgtaaattcggggggttgcaggtattagctccagcaaccatgcgaataacagctgctagctgcagagccgtcattcgatcaatcccgagacgcgagtcgcggtacatagtctcccacagctacagatcagtaggatcagtagatcttcatcggactaggtggtggatcggtatcgatgtattacgcatgggaaattggcagatcattgtagtggatcatccacaatccgagaagcacgatcaaaggcatgtatgcggagatgccacggcggattcacacaagctggaagctgttagttgtccctgcacctgttcgaggtgatacagcacaaatcactcaacacccacaaacccgtctgaaactcgtcgccgaccggccaaataacttgtgccgatccgaacgactgtacgtcagtaatctcgatcacttctcgagacataacggctcctaattagctacagtgctgatctggcttgcagattcctctcgattcctagacacaacaaaggacgatgactcctaataccaggggacgctcgtccgccagagccagacgaggatctgcgaacacgcctgggacgacctctgcccgccccaacgctgctacggctctcaggagtactactgatggggtcccagcgactgacctcgtgaactccaattccgacagcggatcggctgcgattgctaccgccagtgtgcagaccacaagcagagaccgagatgcatatagtcaagccgagaattgtgtaatcaagacgccgacggtggtcaccagagaagcaagatgaccgacgattacaagggtttaccacagaggaagagagaagaagcacactgcagatcaccaagaccggatgaatcatttgtgacgatgtcatccccccaaaagcgtctgagacaaaatgggttgccatagcgacctacccacatgcatccaaccactttctttgcaacaaaggccctatgaaaacggctcttattttcctctcacggtgatcacctcgttgagaggtctcaacgaggtgtttccagctaccatatcccacctgcagccattgctaccgccagaatgcagacgtccgccgctaccgacacaccacctgcagccattgcttgcgagagcgttcagcctaagttcgagggttccagaaccatgagtgagccagaggatgatcctgttgtcatcgaagagtcatattctacgagtgtcgatgcccaaaaggttgctaaatcgatccgaaagaagaggtccggtatgaaagccggtggtgccaaggggaaatcgaagttagatcaagtcctcttgacatttagagagtcttgcatgatggaacagcatgctagataccaggcggcttgccagatcatggaataccaccacaaagttctggagttccatcggatcatcgccgcggaacatcccgaactgtaagcaggcatttacacaattttcaagcaatgaatatgcagttaacctacctaatgcgcaggtactgcaaaaacagattgaaccaagatatcggacaagctgccattggcaattaggtcttggccgggctcaacaacaccggactgaacaacttcggttggatcgacgggggcatcgtcgaaatcatcaatgttgctgctggtgataaccttgctggcttccgcggtattgagcaggacgagcaactccatcgtggggacgaatccgaagctcccgctgaaggagagtccgagagcgccgaagcttgagcgttgagcgttagtgccaagcggtgttgggtagcccagatcgttgctttgagcaagaccaaggatccctgcgatatcgccaggtgatttgtgaaggtcagcgtttcatgacgaaggtgaaattcctcgtgaactatgtctcagatctatcgcgaccgccccccattttatatatatgttcagatgttaaagtacgtttttactggttccaagtgagcagagaagaattcgagcagtatacacgggctcgaccgtcgcgtcacgccttctctttatcggtcgacaacagaacgaccgggaagggatcagggatgatcattggtcaggggggctatcctatctcctctatttgtagaattcgcagtgcttgtcgcttcgcgacatagtcaaagctccatataccggcctccatgatctcgatttcgtcgatatacgtcgatatcgacgcactgaaacttgccgctcgactgttagacaaaggtaggctagacagatcaggcttttcattaagaggaggtagagaacgaaaggaacgtctggatactcgggattgtgagtgcatagtcaaaggaaaacgcaacgaaagggagttcgcactaccattcgagactcggcgcctcactgtttgaccgcggtgaaaaggctccgaaccatcgggtgcgaattcccttcctacatgccggatgcttcgccgccggtctacgtcaggttcgaaccctgccatagaccattctttttgcccgatgtgcgcccttttgcgacgctgaaaacgttgacatatctgtcatgaatggatctatctagtcataccagtcggctgcaaattgtcaacgagaagcaatcaatcgttctataagtcacgaacattagtcactagtcaagagggcaagaagtatggcgtcccagaagcttttccagccgaactcggcgttatcgtatcctcaattcaacacgtaccggctctcggatctaccgtcagccgctaccctgcgtacatacgcccttcccgctcagcacgttgcctcaacttcgagaatttctgcaagtcgacaactggctttcaaagagatacagtccagagttggatgggaccatacggcagggggttcctcgccgaacgagatatgctacatcgacgagacctacaatgttgtgaaggtttcaatcggggtcagtttcgcgattaaacgaataccgtaatttgacgctgacgataaggaccatgcgacgtatctcagcttgacctttcgccatcatatcgaacaatagcatcattaccgatacccctgcaaacagcttccagttctacacaggatgctactccggagtatccctcggtgattgcggttccttccacttcccaaacgcacacgtcatactatgtcgcttcggcgggaacgggatctctctcgattatcgaggacaacatttctgggccagccagtgtcatcgaatacgacttgtccacggatcaagcccagccattcctcatcagggctgccagcatcaccgagaaaggccggattgaactggtgctctcgcgtgctatcaagacgccacaagacgagccgcccagcaacagcaaagccgtacacaagcacaacatcacgtacgagctggtctgtgtgagcctcgagctgtcagaagggacgtctagccgatcggaccgggagctgtttgtagtatggcgggttgaaggcgaggaattccccacgtatgtcgagcgcgtcggtagccgctggattttcggtgctagcaagacattcgcaacgcccggatctcgtgaggatgcgtcaattgagcctcaaaattcacaggacaaggaagcagcagcagcagcagagtctgaagcagcgatggcagtggacgaggttgattatccttactcatggtcacagacaaagacatcgattaccctcacgatcgaccagcttcccgaggatatactgccctctcgggacatcgtctgtctcctgcgttccaatactcttacgctacaaattcacgcccgcgaggatacgctgctcaagcccgtgctgcagcaatttctacggaacggagggaaagacggggtgtacgattggtgggatacgatcgaagggcaggaatctacctggacctgggaaaaggaagtcaacccggctaccggtactttacttggcagacttgagctcagcttggaaaaggcgaatgaaggagtcaagtggccgcagctgtttgcacctcgccaggagaatgacgaggatgatcaggggttgctgcccatacgtggaccgcgtcctgcgcaaggcgacgacgacgaatgggaatacaaggagctcgaagtgcccgagacgatgtctgaggaagacaaggcgtatgtcaaggctagcctcgagggtttccatcagccatctgtcgctccgtcgaagaacaagtacgctggtcttggtcatcaggacatggtgaaccttgcccagtccaagcatgtggcaacgggacacggagaggcaatggaccgctctgatgtcatgctgcccggtctgcttcgagaggagattgaagaagaagatgatgacggcttcgacgacgacgatcacatggacggtggcgagtttgcgagcctgggaggtgcgggaagtagcaaggctggaaaggaatcggtctttacatatcttgaaagcaacgacgcacagacgtctacatggacagccaagacattcaacaagacgccatcggtctcggtactgtcaagaccacttaaaggcatgtcaggtcgatccgaccatagtcttttaatcaaagcccacgtcgacggcaatctttatgtcccacctgggaacttgtcggaaacgtcttggacgcatgtcgcaacaaaccctgctatatccttcgtcttggcctccaaacgagatgcacaattcgtttatcaccgaagcggagacgcgggtgcgaccgtcttcgtcttcgaatcgagacaaacttacggcctggggggtaacctttacatctactggccacctgccggggaaacatcgacgccagctggggagagaagcagagccatcgaggcgaagcagactgtcatcaagtttggcgaaggcgtggaaacgggtcatctcttgggtgttaaaagtatcacgctcgacgatggccgtcagacgctagtaggcatcgctgaaaaggcaatcatcgtgcttagcttgtaaaccgagacttgatgttagaacgacatgagcataatatggaatatacagaacgtcgattccgctccttgtttagcatgctgatagagtggctggtcagaaggaataaaatctggcccgaatggacaatgattgagataacgcatgagttccgtttcaagattcctggcaatcgcagcatcttagctctacgagtacaattgtgtcgaggcggaagccgccactaaagcaggaaccgagacctctcgctaaggccataatttgagatcgcgaacgttgaggactcgcctctgtgaccttcggcctgaaccaaggtcgttgatgacgcgctggaaacatcgtattgtactagtacgaaaagttggcggtaatgagcgaaaaggtgagctcctgatctcagagaacgccgctcacgattacaagccgatggtatgagaagcgattttagagaaggttcgcagacgacgacaggagcggcaatgcccgacgacaagtgcgtagaaagaactttaaacaattatgtatcatcaagctaaagcgatcatcttcgagctcaagttgttcgcggctctagtgtaactgagcgctatgactctacaatagcattcgctagcgtctagagaacagaaccgccctggccaccctgagcggcgccggacctcgaagcacctccccttccaccgtttcctccgaagttgagcaagtcggcgttgataagtccttgttgctgggcgacggcgtcaccaccctgggcgttgccgctcgcaccactacatcgaagaggccggcatacattagcggagagctcgaaagacaatgatggtgtgaaagagggagagactcacgtgtaagcgtcaccaccacttccagccataggagcgacagccatcatcggcgcaggcgcgggaccaggagcaggaccgggcgcaggagcaggaccaggagcggggccaggggcaggaccgggggcaggacccccccgcggagcgtacatgcgattcggttcggttccgagctaccgtgaaaaacagcctgatatacctttgctcggtctggaccggcggtagatccctgaggtggtggttctgtcgtcgaccctgataagggcgttcatcacaaagataatggcgaggtcattcgcgccagcgtcctcacggtacttcgaaagctaacagatcgactgcgcggtagacatccgtcaaaagccatttaatcgagaagaatcactcttgagatcgggtcagagattgaggcctcgtacctccttgacagtgagagatgcctcggtgggcaagtcgtcgtccacatgctctgctcgataccaccgttgacgagggcaagctttgtgttcgcttgcaacgaggcaatccctgctcaatcacaatcaagggtcggactgggagcggtcaagattaccggagaggtacagaagtagcgggggtaagatttttctctggcaccaatcggaagaaagtcctcgacttcgcggcaggttcaagccttctgggtgggttcaactcgaacattggcgggcctgaatcatacccgagtgttctgatgaccttttcgagcccgagggagcatcttagggtgcccacataatgatagagggacgcctcctctacatcgagcggcgcgcaaagacatggtcgatttcctgtattgcaaggtaatttcctgcgacccctctcgctcacagtcccgaggcgcccaaaagaggcgatcggtctcggagacgacgggtgcgggctgaagatgcggcgatcggcatccaggtcgacagaaactctctgtaccacgcgatcggctcggcgacctaaggaataaagaggcggtgagcggcggtgaggccagtacgtcgtcctctccttgtaagaccccatttcgtgaccttcaaagacgaggtgcttctcgtaacgcgagccatcgatgatcacaaacggggcgaacaccggctgtaggaattccctcccccatttgatcgccttgacggtcatccgagatttttgagatttctctgggaacaccagtccgcacagctctctcccgccgctacggcgcctatcaagtcgctttgtcagtcgagattctttcaatctttgaatattcttttcgaattcacggtgcaggcggaacatgtctggcaagtaacgagaccatgtgagacaaccatctatatcaatccaaaaccctctacaaccgtagtatatctaacctgcccactgatcgaatccaaaatccgggacccactcgaccttgcgcctcgtctcgagacttttcaacatttcctcttcacgctccctcgcgacttgatttccaccttccgggccaccgacgtgtccgttcgcatccacgctcaatcgactcgaaagcctcgaccggtagctctccaggaagagggggcacgtatcgagcgcttcgttcaggatctgcacggcataagtcctcgtcggcaggtggttcatcgattgcccaaagacgctccccacctcccggcagagcgcttcaacgcccaaaagcgcccacccggcgacgagcaccaagagtacactccaccggccgaggatcggcatgacttgggccggtatggcgaggagatagagcatgaccaaatggttcaagtggatgcttagtgagagtggaggtggatcttccccgagtgcttcggcctcgcctaacaactttgaaagcgttctcagcgatttgtgtagtttttccgactgagggatggtatgtccgagctgaaatcggggtagtcgctcgaccggctcgagtgaagatgtcttgactagttctgcatcgatctggttcgccagatggagcgaattgacgtacgactcgatcatgcgaagaatatcgagcgggagatttgctggaatcgagcgcgagagcgaagaccgggtcgtcggtacgttgtcatccgaggcggatcgacctagaggcgaggaagctgacggcgactttgaattcggcttggacttgttcctcgatcctggctggtgatcaatcacataggtgttgaaatcggtcgtgagcgagggagaggatggagccaggttgagctgcttcatctgagcctcgtgctcgagcgtccgtgcaactctcccggcagattcggaagcagctcgtcgagtttttcgaactatcctgttcatttcgattccctcgtttccatcgagcgatggttgatcgtctgaatctgatccgcttatcgtcgagctactatcgctcgtgctgtccacggaccgagtttcctggtgctttcgatctccagcgaatctcacccggttcctcgtcctatacttgctactcaagtaaccttcgggaaggatatcacaaagaggcgctcgctgaatcaaaggtcgggtcccggtgaggtggtggctgtaaaggggttacgtcagaccccctgtcgttttctctgtggaccgtgagacaggtcggactcactgcaaggcgaacccaaaggcaacaaaaagacaggtcaaatcccccgccttttcgtccagggccctcgctcgttcacgtcgctgtgaatgggcatctttctctcccgcccaatcggcctctacaacgtatgtgttgactggatgacaagccgacagctatagtctcaccttagtaccgacaaagtgtcctgtctagattctgacagacttacctgacgtaaaacatctctgacctctcccttgaccccgccccagactcccttgcccttgccccattttgccaaggccgtgctgcttcgataactcatcaacagccctgtggtcatgctcagcgctgccgtcatggtcgcgcccgtctgtccgatcagatgcacaggtagcaagggagtccgtgtagagatgagatggatgaaaagggtcgtcaaactgaggagcaggagggacgttttaggtagccgagagctgcagagttgcaagccttattgtttcgtcagcatccaaaatcgtagacgtattcgaccctttccgaacgtacagaacgcctcgtctcatcgtctcttccaacaatacctcctgctcatggaacagcccttctagccatctctccctggctatcgtagagatcgcacctcccgttgcagatttcgagccgaccgatcgatgatgacgcgcaagagtggatttctgatgcgactggatcttgctcctacgagaagcgaaccagggcatgatcctgaagtacgtccagacgggagggtccaagtcttccaagagttgatacggttgtctgcagatagggctaagcgatatgcaattatctctgatccgtctgggacaggctacatgatcgatgatcaacctcttcgacttggtagtacgttgtttaggtcgactccgggatggagatttacatccgtcgccgagctgagcctcttcgcgcgttatcggggttcagaccgaaaagccacatatttgtttccggtcgatcccctcttgcaacgagccggtctaccagaactcgaactgtgctccaagatctgtgactgaatctcgcgatagtattctggacgatctcgacccatgacttggatctaggctcagaaagacagaccctgaacagctgaaatcggctgttgacggtaccatcgagctcggcgatcgtttcgattatagttagcacaccatcctacggagatccgacaggatcagtttcaccctagccggaggaggaccaatgtggttgttttcgtcaccgattcaggagatggtgatccagtgtgagcaatccatcaatcggtacagaatccagcggtaaggatggttgtgtacgagtctgtctgtgacacgagtcaatggctaccgtcctgcatacttgcctggcagttgcgttgtagggactcgcatcaccacttgggttcggccggggtgaagacggtaggaacctctcacagccatacataccttttcatattaggacaagccggacatgcgtagtcggtcaacgtatcgtccagaagcgtcgtccatcctgtgtgagatcagaacttgctgcttggtcgcaagccaaagaattacctcgggatggcctcgaaagaccaccaaatttcaccccaacaatatgctgcgcagactgtatctcgtcatatcgtacatgcgcaatttacaggctggtccattgcatcagaatacggttccgaatgcatctatcattaaatcggttccgcgatgtcatctcctgcgccaagcgttctggacgtggagcatactgacgaactttgaatccactctaccatgtctttcataatcgtcgcaagagaagttgttcttgtgacacgcatcccgctcaacctcggatagagattcccgccgggactacgcttgcgctgttcctctcgtcgcttgcgatcataccgggtcggtctgagctcgaatggactcttttcgtgctttaccttttcctctgtattccgtacaggattgagacagggccggtcccgcatgctaccttgccatccagccatctccatcgacaacagactacggtaggtagaacgtcgcattacggtcgtactattgacacccgacacgagggctatgcgacgagccgagactgcgcatatgatcgacggcggtttcccgcgccaaaagagaaaggtcgctctacttgcgggtgataggcgatttgggaacacgagtcccagtctgctcgtcgctcggcgttctgcgttctgcgagccggatcacgccgatcagcgggctcggaccgatattattatcgttattattattatcatcatcgatttacaccctcggtgaacgacgagtcgcactcccgttcatccccccgcccgggtgtgaagcgcgacccggtgagaacggccaagcgacaggctgtgaaggctgtgtgaggtgacggtcgccgggtgagacgattacgaaccgcgagccgtctcgttgcattccgtgtatgtatacattgcgtatatagtaggtgtaaatcgattcgactcggttcgagtgtgggaattgttcgtcgatgatcgcgccgcgagcaagggcaggatgagagagaacgcggggattgaggagggaacgaagtgggccaaggcatggatgcgaactgagatgatacaggtgatcgacggtttggtcgttttccatgtgcctgccggcctcggggttctctgacagagggcaaggggatggaagggaagaggaataagaatccccacgtggagatgtgtgtcgcgtgcggatcacttcgcttcccacaacccctggccaggcggcgggcgagtgatttggtgccgagattgaacggcgcgaaaaggagggcagagggacagaccgcgagcgagttccgcgtggcagaaagcggctaaaatggcaacgcgggtcgcagaagcagcacacactagctgctagctactcgctactcgaggcccaggagcaggaggcgctgacggtaatatgcatgcatgtcgatcccttccgaggctacccacactaactactcggttcttctctcaaccctgtctcgtcataccctctggtcatcccattcattcgtttcgaacaacgtcggtaaacacgacagaacgagccaattaaatacggcccactcatatctgcaactgtgccccgtaggctcgattggtcattcattcatcgtgtcgcaagcgcacagccgtcaagctcgcgattacgacaagaaggtggacggtcacaagcagtgtgcttttgaccaaggttcgtcattggtcagactctctctgtcttccgtatcggacgacctcgaggtcatctagaagcaaaagggttacaagtggtggaataaggatccagaagttttgcttcgtatgaaatctgacgagctaggaaaggacgacattccccgacacatcggtctggtcccgatcttcctcttccaacgtcacgactctgtcagacggggctagattcaagcaacgcagtcgtcatagcttcacgaacactgacacggtttcatttcgacatcaactgccaccccatttcccccaccaagtcggagcggtcgaccatcattcaaacaccatgtcgagctcggtctcgctacctcacccgcttgcttcctatactccggctcacattcccacaccatcctcctcccgcccctcttccccggtgtacgactttctcgtcgtcttaccctccatcacccgcggatttcgtccatcgtctgctatcaacaaagatcgggaggactttgcgacaagtcccggaggccctttgggtcgggcgaccaggtcgaattctcaccagatcggaggttcactagggaccgggttctcgggtggaggaggtggaacacatcgtgcgagcgtgcctaacacggctttcggtggtcaaactgtgcggagagagtaccaccctcaagcttctcaacctccactatcgtcctcgcgatcgtcacagaacagccacgtcgaagagtatggccccgacgttccgctggatcaacaggtacaaccagacccggcagcttacagatcaagaggaccttcccgggtcgtcccctcgttgttccctcgaccgtcgcccgtgtctagtatgacgagccggtttggcgaaggcccacgcatgggtccaggatcgggttcgatagggagcccgacaactgggtcgacgagagaatcggtacctctttccccagggtccgtcggtcccggtttgggtcctaccagatcgctcgtccggcccagtgagccaaagtcgaccgatctcgattcaccgggatctcgggatactacggatcgcaaaccatcaagcctagacgatcgaacccgtggtgtccccttgaaaagcgctgtgagcatgaacggggtgtttgtcgacgatcaagatcaagacgattccgatccgacgcaacaatctcgatggaaccgattgctcgtgcaacatccgcatgcccggcgggccagtatcgggaatctcgccccgagcgggatggcccggcccggctggtctgggtcagaggaagacgaggaggatgaaagtcggaacggtactctgggtcatggtccggcggaaactgaagcggaaggttcgggcaggagatcagggtccaaatggaggagcgggagcggcttgcggagagattcgtcgttgagggaaaaatcgagcgcgccttcttcccccacgcggtccaacccgccagcggacaaagcgcaatccgggacggctgcaacgatatcgtctggattacgaacggtctcctcgaccgaaggttcgtcgacgaggaggtccaggaggccgcagacgagcgcaggggcattgagtgggacacaaacacgaggtgggaagttgggttcccgtgctgatgctcggggtcagcttgaacccgctcacaatggggatagcgagcgaagaggatcgatcagtccaggaacggtctctgagggcgttgcagctcaaggaaatgccgtagacccggtcaaactggctggacaactcgctcctgctgtcgagctcgtcgaatcggcctcgccgtcaagaacgaaccagacgtctcgtccgacgaccgcgaggggacaatccaacgtgacctcgtccggctggggacacttgtcttcatcctcgggactcgcctcgcccacagcagaatcggcaggacaagcagggtttttgggcaagcgaagtcgcggaacgggtacaggcagaccagggtgggaaggtgaagaggttgtcggcgtcctgagagaggatgggatgccaggtgagtctcgaatagaatagtatcacatgaccgaccgattcgtgtgttgactcctcgtcgcatcgtccacagtaaccacttttaggtcgacgacacagatgtcaaggcatctgcgtaatcagtctgccatcgaagaggcatcaaagacagcggttcccggatcgaccaacggtacatccacggttccgaccgtttcctcgttcgcgagtccactttccagggttctcctggtacctctctcggactcgcccactttgccttccctatccttgctcttggcgcaagggacgaccccttcagccatttgcttccaacaagacctgctcgatcgggccaggcggaccgaagccgattggctgcctagtgctttgcacatgatcgggacagccactagacgtggcagtgatgtctcgctcggcaacgacggtcagaaagaacgttccattcacgtcattgcgtattcggccaaccccgcgctcgccccgtccgtcgtcgatgaatgtcttcgggctggtgctatcggtgttctgcaaccgccatatgacaacgacgtcacgttgaagaaggttcgcaagatgatcatgtgggccgagaggagccaacaggtccggagatccttcgacgcctctgaggccggcggggcggagcaggaggaagcgcaaaagtctgtcgaggcattcgtcaaggaagaggagcatatcctggaagacgccgcggcggtgccatcgcttgttggggacaccacggaaggttacggggatgaccttgcccagagcctcgacggacccaccgaggcagacctcgctacaggtcccgccaagacgctatatagccatctcgccgcctatgacttttcatcgcggcgaagatccgtggataatggaggcttatccctggcacttgagcgagcccatcaagcagcaagacaacatcgattcagatcggcagctgacatccacgctctgccgccatcgatgactccacctgtcaaacaggataggtcgtcttctttggctggactggaaggatatctgatcgccaagcaagaagagaatccgcaggaggatgccacgatcattgcagagctccttggtgaaatgtacaggcagacgcggatcagcatcgagattcagatgatcgattacgccgagtaagtcacgaggatcaccgtaaattatacacgagcggcatactcacttgtccccttggacaggtactcggctcctctagaacctgctcatcgtgaaaggctggttgaagcgttatcgacgtggaatttccgccctcacactttggacgaagccgatctgttcagatgtgcttgtctactctttgaagccgtactgagaatcaagggcctcgctgagcttggcatcggtcaaggtgagaaaagactggcagattgctggggcggcgaccgactgatcgctgcgctttaccagaccaaataaatcgattgctattcgctatcagagcaatctaccacgcgcccaacccctatcataactacattcacgctgtcgatgtcctgcaagcctcgtacactttccttgtctcagtgggagtagcgccgcctccatccatactgctcgatgcaaacagcggtccgtggaaacgggctgaagtcgtggatgttggcaatacggaggagtacaacgccaaagttgctacgcgaagtatcttgcgtccacaggacgtctttgccgtcatgctcgctgccatgggtcatgatgttggccaccccggcctgagcaacgttttcatggttcgtcgagaatctttactgcaacaacagcgtagcatcgctcacccttttaccctttcagaaaaacgccaagaccccgctgtctcaggtgtacgaagacaagtctgtgctggaaaacatgcattgtatgctgatagtgcagctgttacgcaagcacggcttcggctttctcctcgagggctccaagacgaccggtctcggaacggcgctgcccgcatcttcacactttgccggagcttccgaggacgtctcaccgatggcttccgactttccagaggcgccttctaccgctctgggcacctcatttgagcgggatgagcaggatggagctgtagaagattggaagagcttcaaaaagctgctctattctacggtattggcaaccgacatgagcatacacttcaactggatcaaacgatttatagattacggcaagcgaatgagagcagacggcgtacagtctttggcaaagccggaagaggacgaagctaggatcttgttatctcaagccatcatcaaatgcgctgacatcagcaatccggtatgtcacgactgacgacacattcgtcgcctagaccggcaactgaacttatcatgtactgcagactcgtccaatcgaagtttccgaacattggtcaactgttcttttagcagagtgggctaaccaggctaccctcgagcaagagttacagctaccagtatcggtagtagctagcgcggatgctgcaatccaggccaaaggtcagatcgggttcatcgatctcttcacgttgccacttttcgatgcggccgcagatgccatgccaggtgaggctgtgtccgagttgttacaagcgtacgatgcgtatgctgaattatgccaaattgcgtgcaaccttgcgtacaggtctgcggttctacgctgatgcttgtggggagaatagagctctctggcaagaccgctttgatgcgatcaatgccctggcatctaccacacctccgccgccaatcaaagcgatctctaacgagtcgcaaagggccatctcgctcgaggagagatatcgaaatctcttcccgctttcacttccccgatcgatgtttcaagatagcgccactagcatcggttcgacagctactaccccttccactcagaccagtcacagtctcgccatcgacgatgcagccctctcagatacccatagcatgagggctgcgtatatcgagaacactacccgtcgaacgagcagcgcccatctcagaacgccccgcacaaagcgattccaaccatgacacctccaatacatcagggcagtttagatgacaccttcgcattccacagacatccgaggttgtacacttagcatgtaggcacgcagagagacgcaatactcaaatgttctacatcttgtccccgtctagatacaaagatcatcgcgaatgctaccgttaaacacaattacaggacccgagtccgacagctctcaagcctttgtctttttcacaaccttgatgccgagggagcccacgccctttcgcttgacgcctgagggcaggttgacttttgctcctgcgaccggcttgctcgatggtggaggcattgctgctccgagagcgatgccacgagctttcaacaggtcctgcactgtcggctcgccggccgtggatcccattggtttccgtttgaccgtcacggtagcgtcctccaccggctgatcttcttcgtcatctccgtcctcatcctccgagcctgatccgtacccgccgatcaatccacctcctactgccttgcccttgctcttgcccttgctgggaccggcagcaggcgcacctggagctttgactttgtagaagaacttgttgacctcttcgtcttcctcctctagctctcgtttgcgtcgctcttcggcttgcttgtctctcaacgcgtgttgtgttttcaagatctcttccatgtcccgatcggatctctccatacgagcgttccgctgtcgtaggtccgccaaggcatcctcctcttccatttgcctcttggaagccgcctgagactcttccaaagccttcatcggatcttcctcttcagaaacgttgtcttcgtcatcctcggccgcgttgggcatccgtgacaaggcctcgttggtcggctcgaagtttcgactagccccgtgttcgcagatatagtcggcattctgcggatccgtcttgaatgtgatttccgccgagcacctggtgcatttctttcaaggtaagacatgatatgtcagacaagcagctgacagaattctgtctattcatcgccactcacgatgtagaaacggaagatcttgataccataatacgtctcgcctagggcagtctcctttttggcgttaaacttctttcccttgtctgtgaataatatacgatcagtcacgatgactgccggctgctttacgatgcaatgatgtgaaacttacagatgaattctccgcaggtcctacaacacatcgtaaacggcgccatcaaacggacgacctgttgcgcatccttgttgaccttcttccttgggatcttcgaggggtcgaagtctacgagaggaggacattgttagcgctcatttgcagtcgaaagtggcagggtatattgtgggcttacctggagggaagtacttgttgaggaccttacgttcagacatttcgtcgccgagtggatgccgatgagggttatctgagcgaacttcaagcgaatatgctgaacagtgtcacgagatgcgagaggttctggcttagattaatcttccgggcgtgctatattgtgattgaattgttgctaccttgtgctgaattggcgcaagtagatggagtatagcgacagtatccacagctagataggtggtccgaccgaggcgacgcggaagcaaaatcaagttgatcaaagtcagtcacttctcggcgccgacctacagcagcagctatcgtgtaagctgaaagtattctgtgtattcccgcccttcatcaagctgattcggagtgtgggtagggagcattgagaactatcactcgtgattcggccggatcgttcgccacgatcaaatcgccagaatggttcacaagcttgtaagtatgagtatggatacagttattcagcgtggcaattccgactccagcctagactaccccaaagagagctaccgaatatgccagtacaatatccaaatacaagagccgcgcagctttaccacgtgaccggccatggtgatatggtccgttccagacgtgagctacggtcagttccgctttcaaaggtctattgtgatgggcgaatgcatgtcgatgtctgagcattttcgcacgtcctggggaggtctcgtcatccaatggatgcctcgttcgatcgggcccggcaaccttctgtcctttcaatccgagccccgcttgatgaagggagtcggggccagtgaatcgttttccaagctttgctcgacagatgtgatcagaccgccatcttcaatccgcgtcgtgtcgccatggggtagcccggcctgcgctcgctttcttcttgctctcggattcaagatcatcgccaggatgaggactccgaggtccaaaacaacgacacaggaataattgatctgtttgaaagcgagcagatatactcagctgaatgtgcgcaggctaggtcttaagcgttactgactgttccaatgatatctacttcgctccgaaaggcgagactcagagtgcaaaagactcctcccagcatatcgacaaccatgaaaaccaacgatatgcctgaataccgagaatatgaccttcagcattgcaaacggatcaagcgacactgattggacttgcccttgacttccttcaagcggtatatctctaggtattgcgggatcagcgcaccagccagcaaagccgccgagatactgccaaatagcgtcacaggccagtccactccattatgcattcccgcctgtatgatccaaacttcagatcaaacggcattcggtatgtggcgagcgacgcttctgactcacccgaaccgcgtacaccatgcccacttcgaacgcggccatacagatggcaaagaccaagacgaatgcgatgcatacgctcttcctccgtttttgcccataatacatgcactgagctaccgagacggaggaaagaagcccgaaactttgtggctggaggatgatcgggactgagagttcctggacgatagcgtaaactcctaggaatgggctcgctaccgcccatacgctacaacccgtcctattagcttgacgttagagggaagcggaggatgagcactcacaacatgagcatcgcgctcaggccttcgacatccttcgtgcgataacttttcaccagctggggaatgatctggatcgtccagaagactgcgccgatagtaccgagggcgttttccgctgctgcattctcaatcatgctattatgacagggcccgtacgttcatcaggccaaattacagtttcgaactagcgttgaaagagatgatgactctgttgaaggacacttgtatcagacttgccttgggtttggagacggataagcatcagattggagattacccgaacgtcagctcgatcgaagacggggtccggaagggaaatcggaagcatatgtgctcaaattagaacaactctccggctctcgttcacattcaaacgcacaggcgcaagtcgctcgattgaagggagatgagtgatatcaaaggattcaagtgattcgcaactcgcgttcgatgtcttctctgcgaattgcttctttccagcttctgtcagaaaagaaaagtgcccccaaacccgcttatctgcggatccaggaaacccgggcttcctatcccggatttgaactcgaggtgagccaactttgcagcagatatcatcacagcttcacaaagtcattgtagggggaatttgtgggagggcgaccggttcaaagtccgacatgccaccgtattccctgcccacccggagaatgcaaaggttgcgagtatgcaataagcaataaatcacaactcaattcatacaaggtgttatgtatttcgatctcttgttggtctaggagcgcgacgaccgagatccttccaggacttgagcgcgatgatccgttccaggtgaaatcgttcgtcggcttcgctttgttgttgctgcagtgaccgttgcaatcagaactgcccggatggctggctcgagatcggacatggcttactttgagtctgtcgattgttttttctagctcttgtatccgcttgccgtcagcaggcacgaccgaggaggacccggcctgcttgtgcagttcttcttgctcttttagcaactgtgtacgggtgcgaatctataagctacaacctttatcttcgcaggaaaagtttctgactgacttctttcgcggcgaccaacttctgatcaagagctttgacctgctcctttagcaacacattttgctccttgacctcgagcagccgcatcacctgctcgtctgtaaagtcatgatcgataccaccagatccagctcgagagaggctcgttgtagataattgggcttctaactcggctatcctggcctttgagctgatgtcgcattagcattttacaatcagcgtcttgatcggcgcttcgatttgactacgaaaactcactcgatatcactcgtcgccgtatcctccttcagaccctcgacgtctcctaaagtcccaccctgagcaggcgtttgcatgtcattttctaattcttccacccgacgtcggagctcctcgatctcgtcttcccgctggcgcaagtgccgtctgagctgatcttccactttgttcttcgccagtccagcggattcggggagcgagccgttgagcgtctcggtgtttacagctgacgctgcggggtcttccttgacacccttcgagcggctcaaatccttgtacttgtcctccaacagcgtgttcgtctctatcaattccttcttttgcatctccagcgactatgtcgtatgaagcgaccaacggtcagtcgagacgtccttttcttcgactcaacttcgttgatatggcagagcaactcgcctctattcgatctttgagatcagacgactcttctaaccgcttcctcatcttttccaccgtcgcctcgctctttttaaggttttcgctcgcatgtttccggacttcgagttcgtcgcgcagagcttccatctcgcgcgtctcctgttctagcgtcatgatctacgtttggtcatggaggatgagtcccgcgcattacacagccggtagcttgtatggcgatgtgatcactcaccctctgagcgtgctgcgtgatggtctttttgccctgttccaccacctcttcaagacgtgccacctcgtccgcccgctcgtttgattcctgcttcaaccgctcaatctcgaggttcttcatcctctccatagggcttgcgggcgtgtctgttggtttcccagcgagggcctttttgcgaagaggcgtgatgggcaggtcaggggtggacgacgaagcgacaggttcgtcatcctcgtcagaggcagtaggtgattctatccgacgagccggggtggacgtgcgagatccattgacgcccagtctcgctcgattcggcgttcctagcgtgatctgcatatctcgacgtgagctttgagatcttacccaaatcctcgccgtatggagatggagggagactgactttcggtctggtcgcaaccgccgcctgctcctctacccgtgcctgcagctgttccacctgcttgaccaattcctccctgtctgaaagcgttttccgtcgctgcgcttgcaagttgtagagcatttccgatctgtctccaggagggcagaaatcaaagtctgagctggggatcgcaacgttcagtctcgaacgcattcccactgactgtacgtcggcttcgtccgcgtcatccgattcttgaggtaagaccatactcgagagggcctgttcgtcgaagagcacgtttccccaacgatcaggttccgggcgtgacgatgatggcacactgtcatcgattctcgactgaccgactcgatgatctctttcaagacgctctgatcgtcgacctctagctcggtgatgaccccgatgaccccggcgttcttcttgctccacaccgcttgcacgaggaggacgaccttgcacaaactcaacagctcggcctgccaagaagaccgtgacgagggagacgggtcgatgatgctcgggatatccggagtggggaggtaggcggcgagtgagcaggaagggcaggtgaggaggtcgtggtagatccgcttgaggtagcgttgccgagctcccgggtcagacaactcggactcgttcagggcgggtgcaaagtgttccgattctctgtggtatatcgaggttccccaggaagtttcgtcaaaccagaaaagaatcagcacaagttgtacggtaagaatatgccccgtgcgtgccgacttgctcatgattcaaggccccggcgatgatccgtccatccctcaagccttcaaaggtgacctcgccggcgggtcgaccggtgaccgtagtaaagtaggcgacgaacgcctgttcggccgcggcagtatcatcgatgtcatccatagcgtggttgttgcgccaatccaggtgcaggtcgttcgacctaggtcatgcgcagttctcagtcgagatatgaaccccatcagactgccgacttgcgcgaggttgatagctgttgcaagagcttttgtgacaatttccacctttgagtacgttagtaggagctcgagtagcgcgagtacgtagatatctcgtacaaacaaggtggaaacaaacaaacaacgtacggctgcaacgacgcacgcgtaattccgagtccggttgtgtctgacagctactggcagatgatagaaatttacttccgaatccttcaacgatgccgtcatcctgcatctcgttatttccactttgggtgtctgtcccctcctcgcccccctttgccctttgccctttcgatgccgattcgttacggaagcaaaacggcaacgaaatcaaaccaacagcgtcacctgctcggccgatgatgcgtaccaacaactcgttctcactctcacactctactactgctctctttctctatatcactctttgttttctcggaattttggacgttatccaactggtagtctcaatcgagcagtctcgacgagtcgcttcgaattcatctttcgctttccaaccagtcatcgctcccgtactactcccataatgtccaacaacccgttgcgtcgcacggcgacgtccccttcggacaacctcgccggtcgaatcgccatgaccatcggtcgtgccctcgaccctactctcgcctacgctctcctccgtaacggagtcgcgggcaaggttctccagactatcggcctgaagaggatcatcaccttgcccctcgtcacccgtgtcggtctcaacaccgactttttcggggccgggttgctagacaagccaggcaacatgttgctcaccatgaacgccatcaccgccttgcgtcacgtatgtcattcgtcttgtcgtgtgggctttctcacataggtctgtccagtagtactaagctggcttgcctgaatcggtagatctggtgggccaacgcagagtgcaacgccgagttctccgtatccgccggcggctttgtcgctgcctacaactcgctcttcaccgtcatcaattcgctcgtctttgtctaccgcgtctcccgtggaaagaccaacccgctcgcctccaactggatgcagtacctcggattcctcgccgtcgtcgtcggaaacgtcggggagatcgtcatcgagagctccaggagggcgttcaagaacgacaagaggaacgtcggcaaggtctacgatcagggtaggtcctttgtctcgatggcactgctgtttgtactttagtgacttactgacgaccctgccttgttttattgcgtgttaggtgcctggggagtcgtccgtcaccccaactacgcgttctacaccttgcaccgtgtcggaaccgccctcgccaccgttagtcctagactctttataacgaccacaacttgacctcgctgattcatctgtctcgttcgacttcttgaacccatagggctcgatcctcaacgccacccttaccttcctcttccagaacagtgtgttcgcgttgagctcgatccccgacttttccaaccacatggcttccaagtacagggaccagtggaccgtaagtactcactccatctcctgtcaaacatgctcttgaagtctgacacattgcgttctcgtctttcgcgtcatttccaggcttacaccaagaaggtcccttacgccctgattccctacatctactaagcgtctctccacccgtgggggcgtcttttcgcatccgtctacgctctcgatttcgatccgatcgtcttccctcccgaacgtttatccatcttcatatctgttcttgatcgctacggatgggtctttgagattgatacgaaacgatgtatttctagtagcctgttcgcctttctctcctataacgagtatatatacatgtcgtacgtcggacagaaccaagcgggatttccgatcgtgaccttgagacctgcaccaccctgatgggtcagtaaatcagggtcgagggagttcgactgactggcgccgcttgcgtattcttgagtctccggccaatgcactctactcggcctgtcgaacggtcagagctagacttctgggcatcattgacgatcggttgtcaccatacagaatcgcatcagtcgcctgagcgaagcagcctttcgataacctaggcgtggttcaacgccaaggcgatctgctttcacaagattctatttcgacagcctaaatctccggggtaaacaaaaatgctacaagaccgctaccctataaagtcgatgctcccgcttttactacccgctacatccccgaggaaatcacccttctatccgtagtgcaaatcaagaaaaagacaaaactagcagcgaaagatgtgttgtcgtcaccgagacctaagacctcttgccgtcatccatgctcgccctacgttccttttcatgttcggtttgctcgacaccgagacccttcttgtcgaacatggcgctcagtgcttgccgactcgtcaacccaaagtcaaagctcgctcgagaagtcgtgccgatcatgcttgctgggccgtcaatgaccgtacccagcttgtccgcaggtggtgcagagtcggtcgacaggacgagcgattcgatctgctcccggatcgcgcctgtcgtagtttccgaaggcgaggccccagccacgttctgtaaacgctgcatgtccgaagccgagatggaagccaaaccgagaccggccgggtgatcctccgactcaagaccagtgaaagtgccacgcgacggttctggtccggtgtttttcctctcagtacccgtaggcactgtagggaaataatcaggttcctgccctcgtcccccaatgggggcgccaggggtcgacgggaaattttgctgcccaaagtgtccgtggcctggggtgtgagcaatgttatgcgcgccaggtggaccgtaaccgttacccatgttgctcatcggatgagggactcctggagtcatgagcggcgcgcccggagcggcatggaatggattgaatccgaaagctgtcgggctattcaatgttggagagaagggacccaagcctggagacaggaaggagatgggatgaagtggcggcgtagactgtaacaaacgtgaatcagtcatgagagactgcagagactgcctctcaagcgcgacttacagggtacgcatggaagttgtaaccgggcatctggaaacgtatcggggtgttcagtcataactttcgcgctgcaaacggacgaagctggaccactcaccgaaggcgtcattggcggcattccccgcggctgaacgggagacaatgggttgacctggccaaacccgttgaaactaggcatgatgatgcgaccagggtgagaggcgttgcggaaccttccactcggtgccccactgctaggagtgacgttcgagccgatctgtcctcttcgtataccggccgtgactggattcctgggatcctcctgggctacgcgcttaggcgaagaacccaatccgttcccaatattggacaacgaatctgcctgctcgtctagtacgcgatccgtcctgaggtggatcgcctgcctgagggcggctccgggttgacgatcattacgactttggaagccgtcggggcccatcgttcctggcccgtaacggatctggttactgcttgatacgctctgggtggaaatacccgcacccgtgctgttgcggtcctgtcgtactttgatggctcgaccattgaattcataactgtaaccgtcaggtcagcgtactggtacgtaaatgtgcggagacgagtatgtgatatctacccgtcgaaggcttgaacggcgacagcggcgtcttcctcgttttgaaagagcacatttccgaaccctttcgaccgcccatctggacctagagcaatgctatgaaaaggcaggtatgatcagtcaaggcctgcaaacgattcgaccctttcagtacgtactctgcccttacgacattgccaccaaccgtacgaaagagatcctctgcgaagatcccgacttcagatacacacaaaaacgaacgtcgcgcctgacagatcgactcactaagttcctgccatgaggcattgaatggaagctgcattgtgggaacccccatcaatagactgtgtcagatggcagcaccacttaggaactcacattcgcgacgtagagcaatctgcctccgacagtatcctgtcggttatatgccggtcgttgcgccgaaccgttgacagattcattgccgaacaacgaatctccgctacccctttccctcgtggcgagcccaggtccaattcctacgagcgagcctcgtctgctgtcaaagacgtattgcgattccccgatcgtcgatggctgagtgctagcctttcgatgctcttcgtaatactcgtttcccagttgcggtccgtcatcccgcggcgcctgccgcagggcttgggtttgggaggaagagagcccccgggggtcttgatagctcgattgcgctgattgcaaaccaagaggaatacgttgggtgacgttcggactatgccctgacggcccaatggttgccctcgaatcggtccgcttgagaacgtcttccccggtgttaaagaaggatgatcttctctctcgctcgccaaagggggagatggctcttccttgaccagggatcggcgtcctccgatcagcgaccgggggtgaaattggcaatcgaggatcgttcatgtagccgccttgggggtcgacgatcccgctgtatcggagctgcgaccctgccggtcgaggttgggagaccgacctgatgggagagttcatcgaacctgtcatttgctgttggttggtgttccagttcatcattccttgagaaaacggtcctcctgccccgcccatattcatattcatgttcatccccatgccttgaccgaggcccatattaatgccgctcatgttgcctcccatgttcattcccaagcctccccccatattggacggcatctgaccgccccctcccgctcctcgtcccggcatggcataactgctcggtgggatataaggatgaggctcgtactctgggggtaatctgtccggtcggacctccaacacccgggtctgccagttgtacccgttgaacatctcgatggccttgatcccatcctcctggctgcccatcaggactgaaccgtgaccccgagatcggttcgactgagggtccagcgcgacatcggctcgaaggacggttccggctcgacggaacaggtccttgacgtcttgccagcgaacgcgataggggagctatcggagaaatagcatcagtgtccaattcggtgcgacagtgttgacagaggttgagcgactcacattcccaacgaacaggttgacccgtccgtccacccctaccgcagctgggtgaaacatgatgggcgtatgcgacctgccttctacagatcaagaacggagcggcaattcctgagcatcagtgcgtatcccatcgaccaagaggatttctcgatcggacgtacggaatgtaccgatcgttcctcccaacctgcctcctgaacctgccccgtttcctacaccattgccggctccaccgaggggaggaagttgaccgctatacccggtgcccgtccctccgaggtaaccgtccgaacccgtgcgtacccccgtccctggtcgacctgatacgtctcctccggtatgcacatcccctctcgtacctccattgttggacccgaaactcccgtcggacctcggcagtgccggaggtcctacggcgtgacctccctgttgaaatggatgttgatgcggatgttgacccgatggagccggggtggaagacgagcccgaatttgaagaaggaccggaaccggcgagggccatcgcgttggcgatgatctgctcgatggcttcgttactcggtggatgaggatagtgcgaatctacgggcgacaagggggagacgggtgaatccaggtcggtcggcctggtaatgttgtggttgtagtggctatcgtcggcttcgagatggagtgagaccgatggtcgaccgcttgggggtaaatcgatcatggtcgatggacgtcgttcgacccggtcgagtgatgacgatatcatccggccaggttgcgagccaggaaagaccgttggatcgtcaacaccttctcccgacccgtcccgtctgggaggattgtcctgcaagccgtgacaatgaacaagaagatgtcaatccggatgaacgatcgtcaggaggatgaatacttgatcgatgtgatcgtgcgagcttacgagcatgacgaccctttcactcgagcggtctgtttaattattgctgtgctttgaccgagacattgacacgggtccaggctggtccgaattcttttgtctcgcgatcgacctgtcagtgtgctgctcgatatgccacaccagcctgagatctgtagacctgttcctatgtgacattgccagtctcgatagagatgaggtggatgtgcatggatggtggtcgacgttgttcccaaaagcaagctagccccccccaacccctcccgttagcctagcctgttccctcgtttttgcttccgttttcgatgcttcggcgccgcgatcacgtcgtcacaaccctttgcatgaccgaccaactcatagtcatgtactcataccaaaggccgagattcgtttcctcttttcatcgcaaaaaaacaagtctatatacttacgattcacgtcaacaagaataaagtaaaaagtcacactagtctatagggtatacaacaacaacaacaacaacaacattcagatgcccgtcgactttgctctttgagaaaatcggggggggggtccgccttttgggtttcatcggtcttttcaagcgtacatattcatacgctccttttcttacactttgccactcaatctcatcatcatcgtcgtcgtcgtcgatcgtcgtcgtcgtcgatcgtcgtcgtcccatcgccttgagcgatgcgatttagtccaaatatctcctccagatgtgcttttcaaccaatgactggccacatcgtcaagatgatgaaaggtcctgtccttccagtccagatttcctcggcaatcccagataaaaaaagtctttagccccagaactcatcaggtcgactgattttccatatgcatttgcattctcttttgcccgtgtggttcgggtttcaatctagtctctttcggtccatttccgtcgtcgttcatgatcattaagggtccgtcgtatcggccttgcggggccgactagggggaaagattcgggtgagcgagagggccatcttgggggggggtggtggtgataatgtcaagctgggtggtatgatacgacgacgaagcgggaggttgtgaagaatgtacgatcgatcgagatgatcgagatgatggcagcgacgacgacgacgacgaagacgatggtggtggtaggtgtggtagcgagtgtgtgtgtgtctccctaggccgcaactcacgatcgcccattcgttcgtttgacttttacccaatcttcccttttggcggggtcgaggtcgcgcgcgaaatcacccgcggatcgagagacaagccagtccagtgtcagccagtgaccaccagctagtgagtgctgcaagctaggctgttcacatcgtagtcgagtcgtttctcacgcgtcatcacattgatcgtcatgatttaaggagagagggctaggcagcgggggttttgcttccgttcgacccgaatttgatgccggcaccacccgtgtttcttttatctgtgcgaaacggttgatcgactttcgacctcgaagcaagcaagtgttcatacaagattcatatcgtctctagcagctcgtagtagcatctcatccatcctcgctcacaccacccccgccacacaccacctaccactgcgaggaaaccttgccattgtccccgtcgcaatgtcatcccccgtcacctctttccctcaaccggcctcgagcctccgtatcctcttgctcggtgccggcgggagggaacacgccctcgcctacaagctcgctcaatcaccccgggtcgccaaaatcttcgtctcgcccgggaacggcgggactgcagatatgcagggaggcaaggtcgagaacatcgacgtcgcttggggtaaacagtttgacggcttgttggcctgggcaaaggagaacaaggtgcgagtcaacagccagcctcagcgaaccctggtggtcagaccgagctcaaccccgtaatctccttttcgacaggtcgacctcgtcatccccggtcccgaacaacctctggtcgatggtgtcgaggccgtcttccgtcaaggtgagctcggaatcgcgacgtacccgaaaagtcgaaagaacatggagctgacgaccgaccgacccctccctttggctttgactttgactttgacagccggtatcgccgtctttggtccctcgcccgccgctgctctcctcgaaggttccaaagccctctccaaggcgttcatggcccgtcactcgatccccacggccggattcgcctgtttcacaccgtccacttaccaagacgcccttgcctacctcgatacgtgcggttaccctcgggtcgtcatcaaagcgtcgggcctagcgggcggcaagggcgtcctcatccccgaatccaagcaagaagcacgcgacgctctcaaatctgtcctcgtcgacatggaattcggtggagccggggacgaggtcgtcatcgaagagttcctcaccggacccgagatcagcgtgctcgccttttctgacgggtacacgttcaagtgtttaccgcccgcacaggatcacaagcggataggcgagggtgatgtcgggctcaacacgggtgggatgggcgcgtacgctcccgctcccataggggacgaagagacgatgaagaggatctcgcaagaatgcctcgaacccacgctcagggggatgaggcaggaaggttaccctttcctcggtatgctctttaccgggttcgtactcacctcgtccggtcccaaagtcttggaatacaacgtcaggttcggagacccagagaccgaggccctcgtcttgctctctgaaggggatctcgcagagatcatgctcgcgtgtaccgagaggaggttggattcggtcgggatcgacgtcgtagacggtaaacacgccgtcagcgtcatcctcgccagtgaagggtacccggggagttaccccaaggggaaaaagatcaccatcggtcaggttcccgagggtgagtggttgcaggtgactgccatcgaaccgccacccccaagctgatcattcgatctatctcgcgggcaccgcccgcaggcgtgcacgtcttccacgcgggaacgaaaaagttgcaagacggttcgatcgtcactgacggaggtcgggtcatggccgtctgcgccgcgggggacacgctcgaacaggccgtcgagctcgcttacaagggtgtcgacgccgtcgactttgagggaaagacgtacaggcgggatatcgctcatcggtgaggaaccaccccaagcgcgcgcgcgccgcagtctcgctcattctcgaaatcatctcttctgacggtccgaccggtagggcactcggcaaatcggtttcgggtggcaagaacgattcgctcacctatgctgccgcgggagtctcggtcgacaacggtaacgccctcgtcgacgccatcaagccgatcgtcaaggccacccgacgacccggtgccgatggcgagattggcgggttcggaggcgcgttcgatctcaaatcggccgggttcagggatcccgtgctcgtcagcggtaccgatggtgtcggcaccaagttgagggtcgccctcgattgcggaatccacacgagcgtcggtaagtctcgtggtcggtggtcgggtgcgtgggtcgagacgtcgggctgatcgttagggttcgaccttcgccacgtcgtctcgcgcgccctcgcatgcaggtatcgatctcgtcgccatgtccgtcaacgacctcatcgtccagggagccgagcctctctactttttggattactttgcgtgctccaaactcgacgtccccgtcgccgcagacgtcatcactgggattgccgaggggtgccttcaggccggttgcgctttgatcggcggggagacggccgaaatgccgggcatgtacctcggtggtgagtcgcacggcgttctcagagggacgatacgcataggcttgcgcgctgacactccgacgagatccggtagacgactacgacttggccggtttcgccgtcggtgccgtcgagcgggaattactcctccctcaacccaacatccaggccggagacgttctcatcggtctgccctcgtctggtatccactcgaacggtttctccctggttcgcaaggtcgtcgcccgttccggactcgagtacacctcgcctgcgccttgggacgagtcggtcaccctcggtcaatccctcttggtccccacgaggatttacatcaagcaactcttgcctgccatccgagccgctttgctcaagggaatgtcccacatcaccggaggtggattcctcgaaaacatccccagggtgttcccctcgggttccaacttgggatgcaccatcgacgccaaggcgtgggagttgcccgccatctggaagtggatcatgaagaccggaaacgtcgaggccctcgagatggccaggacgttcaacatgggtatcggcatggtcgtcatcgtcgccgcgtgagtctgcacggtaccacacgatcggttttgtgtccatgcgctgacaccgcatctttccacatccgcagtgacaaggccgaggccgctttggaaagtatcaggagctcgggtgagcccggcgcgattgtgatcggagccatcaaggatggtcagggagtggagatgcaaaacctggaagcctggtcgtcgtgaccgggaggatcgagctttatcgtcatatggtcgttcgcccctcgcttccagtcccaaaaagggtcattggtagattcctcttgttgtaacaacgctatagtaaagatgcttcctgggttgtcctttcgttgatagatcgttcacaagtctgctcgataccagcggttcgtgacaaagtacggcctggcgacggcatgacctgaaacaagcgaatatcaagagacaccgactagttggtatctgatatctagctagacatggctcgatccactactactatacaccgcgggatgagtttgatgtctggcatggttcgattcagcagtagcgagcgaatcgtggagggcaacgactctcgtcctgtcgatatcatcactcgccggaggacgtgtatttggcactctgccgattacgcagctcgctacatagcgatcaagggtgaagaagcgagcaagcttagccccttcgctcatgtgtttgtcactttgacgcacatagcaaagacccctagttagcagcaattgagggtcgaggcgaaccgagcattggcatccaacgacaacttgtccgtggcggacctgtctggtcaccaatgtgggttcgaagggactgaccaaggaaagagagcgtgaatccaggtcgatactacgtctttggccagaataccgatacaggaaggtacgaaactctgcgagattatcgactatcatattgcagcgcacgaacgcatcagtaacgcactgatgtacgacagagaattctcttcttgaaagtcaatagaattactgcatctataagttgcgatctatcgtctagattgattacaagcaaacattccttgtaccactaagtggtcgaaaccactgtgttcgagtgtccatgagagtcgttggtccctttacaaaaatgtcctattggtgaggcacattggccacgttacatccgatctcgaatgcctgtcgatttcggttcgattatccatcgttttgaagcgagcgatcggtggagaagaatatccgccaggatcaaaaatattgatgcccgtcgcgactatcccctgcgtccgatgaccttctgcttgtcgctctcctgtaacaagcgctcctgctcctcccaatcctcgtcgatcgcttcaagtgcgagatttcgagatcgttcgatgcacgaagacttgtctttcgagatgacgaaaccgggttcacaagcgagcacatggcacgtcgccaatgcgcagctcgtacgacgggcggagggaatggcagtacagttttggctacgataggaagacaggccaggaggtaagtgacatgcaatggaatcgttttgctgaaccatccggaacgtacccaaggttgaagatcgcacagcctccgcagttctcgacatcgttctcaaagtcgacgcattcgaaaccgatcctgaaccagtctgccagggtttccatctgagcaccgagctcctcgggggatagcccttcaagggcttcgccgacgagtccagcgccaggagcaggacaagatttcatcttagtcaccactgcggcattgtttgggttgagaggaagggcgttgttcgtcgaggaaggaacggcagctgcctcgggagagggacagaggaaaggagagtagtccttcttgttgccagggatgtaggtcacgtcgacgtgtttcttcttgtgcaaacctcgacgagccatcgagggtgcgggagcctgtcggcggactggcgcattatcccgagatgtcaggtcaatggtggtcgatgccggaagggcggctgctgaagacagcaagagcaacgtggagaggaacgaagtgatggcgaccatgatggaaacgtttagagatcgagtttatgtttagtgtatcggcgagatcgagaggcgtgagacggtagtgtatcggcgtgatttcgagcgtaagagagtgtatgtcgaaagagaagcttgtttctggaccggcctcgaaacagagcttaaggattgagataaaccgtttgagcgagtgtgggtgtaggtgataacgtagatgacgatgctggatcacgactgagaaaagaagtggattagagatagagattacgcagatcagcatagcatggcaaaagctgcagttgtttgcgtcggtccatgatccagggtgggcacaggagatcgtatccacaaccggccagaatgtcgaaagcccccatttctcgatgtttacatctgtgacgtgccgggatcagacctggatcgtgatcgtacctgaccggaatgtgatcgtcgcgtccggtctgtctccacctgccggttcgcgccgtcaagcctgagtgccaccgatttagaagaggaacgtgatggccgaaatcttgcaagccacccctcatgtgcagccaccgtatcacgcgtcaggatcgcttggggtgctgccgtccggcagtgtgcggtcaaaacgcgagcaagccaccttgaaatcgccggcgatacgatgcgaatacatgaccaggtacatcagggccaacctgctagctcgtacagcgttttggtcactcggcttgctaacgtttccccctcgattccggtcgaccggatgccctgccagacacgctgcatctctattctcttcctccatgggtcaatgaggcgtagcatgacgtactgcatcacatttttttggccggaagtcctgcctcgatagatcgcgataccaatcgctaccgagaccacggccaaagtcaaagtcgtcttgctgaatcgtcgacgatcgatcgaactctgtttcctcgaaggtcggtaccggacagggtcgtcgtcctgttcttcctcggaatcctgagggggcggatcgacgacgacctgttcctcatcgacgccactgcgcacccactcggaggcgaactctagatccatatcgttcggccccggaacgccatccggataagtgaagatcacgctcttgtcacccataacctcgctggctcggattttggggtggtctagcggaaacctctcccagagactatcagtcagtcggaatagctcggagaggacgaccggggtgagcggattaggttcgctgggatccaggtacgaatctcgtcgtcgtggtgcgagatgcactgccggcttcaaatcgtattccggtgaaggttcaggatcgtccgcgatcaagggaggtagaagtgacaagttggtgtggagcacccccggatcttcgtcgagcgtgtccttcagagacatcaggcgctctttcttcaactctatcaactgtttgatggcaagagagacctcatcagcaacatcccgtcgatcaaagtccatacggactgaccgccactcctaagtatatcacgatggccgggttacggcatagaagatagtcaaagatacgttgaaccggaacgaacgtattgcaatcgtgcgagaacagcgtgagcatccaggataaggcgaagtagggcgttggggaaacactgcgacatagcattacgtcttagtcaggcattgatagaggggcacgctgagtcttaccggttgaccagatgggcgacttccggatcgaccgccttggtcagacgtttcaataatctgtaaagatctcgatcagcatgagttcgactctaatcgacgttgatgcgatatgaccgacctgaggtagcccacgaccggaccaagactgttgcccattccatctctgattctcagcaagctcaaggcctcgcagcaatcgacgagcttcgcccactctggcttgtcttgatttctgaccttgggagctaccaccgattccgcaggtctctcctctaggacactcggcccttgcgcgacctcctccagggtcaaatgcggctcctttcccggtgataaaggttttatacgggtctctccgtttacggtcatgagaccgtccagcttcacttgcgtgaatgagccgtttcggctgataggtttggaaccgttggattgcgagttggtccgcatgcgattgcgagattgtgaacgagactgggaccgggagtgggaccgtgaggtagatgtagatccatgagcagacgaagacctcggttgtcggcaaggtggaatgtagggaaagaacgaaagatacaataccgagatgatgtcgtggtagccctgttgtaccagctaaacttccggcttcatggttgacttcgagcagtggcatgagacttacttgaaagtaggaaaggcccgtatgtcgtcgtaagacggtcatgatcaattcgttcagttccgattgtagtctcttcttctctgtaggagtcatcttctcgggatagtgcacaaaggacctgttggtatcgagtcctacttggcgctcttctctgtgaggttcttcggccgtctgatgtcctgcagtctcgacatcctctcctttttgtcccagaatcggcttcttttctcttttttcccccttggtagtgtcgtctggaatcgtatcatcactagctttcgttgcacctggctccgcttgtgtagtcccagccgaagcaccaacctggaggaggtaaggcctatcgagtgatggaaacggagttccgaatcagggccaagtcatacatgctggaattggatagagagctaggatcttaccacactttctgtcggagttcgttggttccgaacccacctggctcgaccgaccacttcctcaggctgaccagatcatcctgcttgatcgcgaggttcaacgccgtttctcggctggtccgccaatccaggtcctgatcatctgagcgagccatgtgtgaggcgctcgatactcttctggatgctaagactgactgtggataaaggctgacatccgacagagacaaggcgatagtctatggtcggaaatattgaggacagttcatttcggtttgatggaatgacgtatcggacggaggtcgccggcgagccgtaacaaagtgggctgccggatcctaaatcgggacaagaacttcgaaacaccttcgaactactcctttacacaaaccttcaaaattaagctgcctccccactcgagctttgtcttctcgcaacaacccccctagatcaaatcgggttccatccttatcctgctcctagtgacagaatcggtcaattcccccgcgtcggagggtccccgtaagactcttctttacaataggatggcgggagcttggtgaataatgactggacagcaaaactctatttacaattggcatattcatttggataacataatgggacagcccaccaaatctgattagctgatagagtatacatatttcggataacgtagaaaagatcctcccgtcgagtgttgaaccccgtcgctttcatctgtcagaatctcccgaagcaagtaattccagacatttcctgttggacatcttgtgtacctctgtgagatgggaggacgatctaagcgtttgctcctccgagaatgaacaggactgctcttactcgagtagtgcaatccgaaattatctctcctggcgaaactcttctcacaccctttgtgcaggcaattgaatggctgagagcatcacgagatgagcatcgggtctgtcgagcgaaacaccaggccgatcccaccttctccatggtatggagtcccctgacgtgccgcttgacatgctctcgcctcttgaaacaagcgccacagctcggaatcggacagacgtgtactacgtttgacctgaaaccacaacggcagatccgatcagcgatacgcttccgagacatgttaagcaagactcacttgactgatgacggatcttgtgcggcggtacgacctcgtcgcaccttgttgatcgccgaatctgggattggatcggttgacgccggatgtctgccggctctctttttgatcaatctcatgcccgccgagcggcgtgattggtccgatccaacatcttcgacctcgacaagcatctgatcatccggctgatcgttctttcctccactcgtttgcgaacccgatgtcaccctgcaaggactcgcttgagcttgaatcagcgcacctgctttctgagctgcgcttcgtgtcggacgacgatgactatctggtcgttcgagcagtatcaatgggtgactagcagtatactccgtaaaggcaccggtatcacgcgtcccggatgcatcatcgtcatccaaatcagttagatcagactagacggtgggtacaggtcagccattcaggatgcggtcattcggagcgctggtgatttcacttaccatgtcaccaaagcatgcctccaagcttgtagccttgggatggcttaacttcggaccttccgcccgagagtatctacgccgtccaccaagggcattaggaagcgatgatgtcctgccatacgatcgaggcaagccgaccattgaattggttggaggaagattggctcttgccctcggctgttcgtgaaagctcgtttccttgtaatccacctcatggcgtcgattcttggctatcgactgccgatagactgccagcgggatcccggccgatccctcgctgtcgctattgggctggtcatccatatcttcaccatcaaccatccgccaggaaggtcctccagaacgatggtcaaaagggggaaattcggccgtgtatggagagggaacaggggcatggcgggctccaacgactctaggccgtgggtcccagtgtcgtgtgagaaagggtctggcctgctgagaattctctgagtgtaagcatcaccaattctctgcaacggtcccgctccagacccacatcgattgccacgtccctcgagcctcctacgcccgacggagccgacgactcggtcgatctcgatgggcctgccgtggcgctcgcagacctgcccatgagccaactttgaggaaccaattccggcttcctaggcatctctcccatgctcatatgaggcatcatgtcttgatcgtacggattctcgcgatgaacagtcggagcttgtaccggagaagcagccacggtgtagatcgggtaccgcgtctcatcgtattcatatgtcggtggaggcgttgaggtttcgcgagcgctggaagtaggatgatgaaaggtcccgctggaggttgacgactggaagggcacagcatattgagggatgatccattgagccgggtagcagcccggtgtgtatagccagggggttggaactggctggtaacctgcaaacacgggtactctgcaaacgcgggttaataatgatatcggtaacatttgcttcgttttggagtcgagctcacatctgtgcaaattggggcgggggcatgtgctggaaatcgccctgtctcgctccttgttcagcggtagacttgtaaacttccgacattatttatatggatcgtggttccagagttccactgaagatgagcgagcgggagtatcagtctcaatctcaccagatgagaagtcgagaacgccaaacgggaatcttacctgacaagccaattcgcgggacccgggcaagaaccactaacgaggtacagaatctcggttgatccctttccaagcttcgtgaaataagagtgaactgcacctctctctgcacagaaacgtcgacgttcaggctagttgcgttatgtgagtgttccagacgagatgcgcaacgtcttgaaccgtgaaccgagtgaccaggaaatgagaggccatgggagggtgataggggtagcaaggcattttgtgtgtttatttgcttttcacctcgtcacgagtcatcaattcatcacaatgagatagaaacggcgtggggtgaggggttttgttgtcatgatgagcgaatcgatctgatcgcaaattcttgatggatcgtcgatcgtcgtccagcgccgaccggtttctcacgggcctcctttgagaaaccccacacagagctcgccgctcgacatggctcagtaaggactgagtgatactggatgagtgcatttttttacaagaccctgcctgtatgtcggaagttcaggccatcagccgggaaaaagtgctgcaatcccgtgatggacctcgaaggggctgaaacgcggacagggttaggcgcgcgtgtagtctaaggacattttgggatcacgttgaggggtatcttcgtattgtttgcatctttcaagtacaatcctgcgattcgcccagtatggcgatggtaatatacatttctgtctacacccatgtcatcctcaagctcgaggtgccattatttactcgaccacgcaaagcttgctcctgacgggaacgttttccttctgaccaggttcagggaacccgctgactttgacccccttgcggaagaggacgcaatgagtggaacctccaaagtggaacatactgtcgggagatcgtcatgcaggcggttagtaagatgcctcacagcgaatccgtactcgagaggatggcttacccgagctggtctcccttgttcacgtgttgaccctccttgacggtggtctcacaagtcgatacctcggtcattccgattcccatgaaacacatcaacccgatcttggggttgtcagcttcgataaagatgatggctcgagtggcgacgaccgagatgtactcctggctggtcacctccccgttggaatcggccgggtttttgtcggtaaagtcctcgtagaggggctcggaaaagtagctcccgtcgactacataagacttcttgatagtaccggacacaggcgtgtgccatcggtggtacgacaaggcgctgaggaaagcttgatatacggtcccgccgacaaactgctcggcaaggggatcttgggcgagcatgtcgacgacagagtacggttgtcctttgacccagaatcggtccctcgccttgacatcgtgagcgaccttgtatgtcttgctctcgcaacagttgacgacgacgtcatcgttctcgggttcagcgatgggtcggataccgtcttcgaatcggaacaaccgggtgaaaaagtcgtcccagctcttgtatccatggtgcttggctttgggatcacaatgaaacaattcgtcgaatcccagctcggactgaccgaggttggcaacctgcagcaagctcttcttcccgctctcgccgaaccagccttccttgttcgtgtcaaggaccttggcagactcgggcgagctcaagaactcgttccaagcatccaagaccttcttgatcatggcgttgacctggggatcctggaagacggcgaacccggctcgggttgccatgggccagtcgagaagagcgttgatgggtactccgacgagaccgacactgtggcctgcgtcagtccaggctggagcagtcccgagaatgtgattgaacatggcgaggagatggtcgaaatctcggacctgaggggtctcgccggaagggtccttgaggtagggcttgctatgagggatctacgataggaacgatgataggtcattagcgtctgtgctctttgagatatcggaaggctttcagcctggactcgcctgttcaaacatctggttgaacaacatgtacaacctcgaatcgttctcaaccatgtccttgaactccttcaagaccggatgcagctctttcgggttggcatccacgtgctcgatggtctttttcatccatgaatgatggtgacgcttgtcctggggcatccattgtccagtcttgagagaacgagaatcgagtaacgtcagcaatgcagaggtatcttcgtacgaagcgacacacgacgacgtaccctggggacatggtgttcgtcgggcacggtgtgatctttggggtctgacatgatgacgagtgatagattgttgctggagaaatctacttaggttgcgtgaatgcgaacgtatcgagttgcaagttgagctgactgcaagtcctcttataacttgttggaacaccccgaatacacgagctgtgtagctactttgtccgctggcttttcgaatgtcatggtcgatcggtctgacccgtcataatccaaggtcagacccagaatgatcccggccgagaaacgtcatcgaccggacaagcccgaaataactttgaacgctcggcagcgagggagtcttgcgcagacacctgcggacctcgtaaacaaagacatgtccgatcattctagtcccacatctcgagctctcctctccgacttggtagactggacacaattaacatcactatgagctaggaacagaattgggtccaacaatttgatcattgctacctatcgatagctactgttctgttggccggtcggcttgtaccctcgctggtctgcctgggtcgaacggttgtccgcgggtcctgatggacttggcgcatcaccatctcgtctgcctgtctcccccttcacgcagaaggagatgagcctcggtcatgttaagacgaccgagcacttgacgggcaaaaggccggcaggcgacgagctatttgctccggaggcccatccttatgctccttgctcgcttaacctggacgcatcccccgccgataaactctcgactccactcaccgatcacccggagctcaccatcaagcgaacctggtcttttgccgggcactctcaagatccactctgcgtcgaatatcgctacaccccgagaacgacaacgagtctcgtcgtctggatcttgtggaccatgacgtcgtcaggttttgcatttgctttgcaaaagcacggaagcgattgggtgaggttttcgtcgagctcgaaatcgcgtgaacgtgacatactgatgggtgcttaatgatttagttgattacgcatagatggaaaaatgttataggcatgtgtctattgctggtagccagtaaatcgttgatatcaggtgagttcagtctcatacacgccattccgccgtccacggctaatctctcgttcgacactactctagaatccgctgtagcatatccgacccttggtatacagctggagtcgacagtagccttgaccataccggtaccatttctctacaccgctcggccgttcatcttacctctgggcacttccaagcgcttcatacccatttcgaccttgaaatccagctcgggcgtcatcctcaacgagacgttccgtcgatggagtgtagtctactaccttgggctcatgagtcactctggcttacgagaagccgttgcaggcgaacgggtggaaggattagaggtacacgtcgtttttcctgtgagttcgttgtggacaaggaaagcatacacctggtcagtaaatgctgactagtcatgccgggcacctatgggtccttatcagaatacgaggcccaggttccccgtgctcttggaggtgtatcatgggctccgggagacattatttaatgaatgggcccagcccggatgattttacaaatgcaagggcagcaacactgtctcaacagcgtctgggtcgcacaagcggatgaattcgtatatctctttcgctgtgacctcgctcaagggtatcattttggaacctggataccagatattcggtcaatccgtctagcgattccaccacgtcccattgatctaagtgcacacacatgaatcgcacgacgatgccgaaatttccacacattatcagctacagtggccagtggtactgttgctagcgcgattccgccaaactgtcgtaaagtgattgagtcgaaggctgaggtttattgattctgtggccctcacggctgagtcactgatcggaagtaaattactcgataagcttccggagcaccggttgtcgatcgatcagctgtggaggttaacctcgatgccgtgcatagggtcatccttactctttctctaaagaagttgaataatgaatcctgaggagtctcgttccagctctcgatctctcacatctgaattgtcgtcattaccgatggagcaagaggagcaggtctcatccgtgcagctggaggagctaccgtacgagattacgcaggctatcttgaggcgagtatcggttatgaccgttgaacgatcgatgtacggtttctggacttacgctatacgctcttttgctcatgatgcagccatttgcctttgaaggatcttgtaccagtatcattgctctcgcctacgctcaggtcaatcgcattatcgccccaaatcaccccatttctaggcccagttcagcggatactgtttcgcggtccgccctacccaccagagctcgcctcattagggagctatacgcacatttctaggaatgtattcatcgaaattctagtccgagcagaagcgagatggattctcgaagagatggagatccccaaattacccagcgctgtgtgggaggaaatctttagtaggcggttcttgccaagctggaggcggtacagggagggagacgaacattggagggccgtgttcttgcggacactcagacgcctggagcacagggcattaggatgcacacacgaagagtcttggactgtgagcagtgtagttcacaagttctggctgccactcctagctgatatctcgtcatcactcagcgcttcctcatgcttcaccggaacggtagctgttctctcaatcggatatattcacgcagtttcgatcctttggtcatcttccgtgagatcaagtccgtatacggtataatatcagtgcaccttaccagcgcgacactgactgatcggcgtgccctacaacagactccagaacaacctggtgcacctacctacacaagtccggctacttgtccagttgcaagacgtccgcatcctcatgtttggagtattggcgccacctcgatcggtctttatcaacgaaaaggctttccggttgtgtcacccgccgagactcacaggtaccaacggggcgggttgggagaagatagtggatgaagatggttacgagctcggcgacaagacagaacgggccggaactcgtcgcaagtctcagaggagaaattcggaacttccagaaccacatgtagcaaacgccgcaacagcaagaagccgatcttattcggtcgcagaaccgaacgcgggaccccatcctcaaccatggaacatgacgaccgcgcaagtattcgctccgttgagcgcttccaatcgcctgaatagctcggtgcagatgctcaatcataatcctgcgacggacgaacggatacctgctacgcaggcttcatcatcatcacggaatcgctcaggttcgggttcagccttgacgaggatgctcagatttggatcgtcatcgagttcgaacaacgcgggaccatcatcgcagcccccaatagagccgctttcccgcacaaacacaaatggaacgaacccttcgggatcgaggagtcggaactggctgcgcagaataggttcccgtgattcgcaagaaggtcgatcgtctgatgatcagcagaggaacaatcagggtggactggaagaggttcccgaggatgccttgaggggcgacattctgcatgatctacccttgacggctgtcacgacagtcgccgaggacataaacgggcttgggctctccgatgcaaggcaaaggagcgcggaaagccggccaaagggcagccatctcgattcgctgccgtattcgatcatgtcacatccgtgtccggcacccagtcacgccctgtatccgaactacacgccccgcgatcaagtcgcggaggaatccaacgagacgtatccgttagatccgatctttgcatctcatgaacagggaggaggagatgccgagatccatcgaaccacctcgggtcacggggtcgatacgaggcaattccatccaattctaagagagcggcgatggctgcaaggcgtcgtcaaggatggtggtagagtggttcccagcgaatgggtacaggatcgagcatcgggtgagggggaagcattgacctgggtcggaccggtactgtgagcctttcgagcgctttggcccacttttgcacgaccgactgatcgggtccgacctcgaacagattgatcgctcaattgcgcccggcccatcctcgaccaccgaaacacctttcgacgtcggacggtcctgcagcggaccatcatgacctgcagtccacgtccacggtagaatgggtggacggtccagcctcgtcacccgacctgggggcacatggaatgtacgcctcgttcgagtacagcgacctggaggcgatcggggattggatccggatcggcgtcgaaggagacgccgacggtacgggggaccaagacgcgcagggcgtgagcgcatggggtggctcgggaggaaggagggatgggttgggattcggaagatgagctcgggcgattctatgagtgacaccatacaggtgggcagttgcgatgtaacaccgctttgaaacggcacgtagttccaaggccgcagtgtgaatgacgcaagatgaggttggaattcgccgcgttaggttaggagatgacttcgggcatcaccgggtatcctcccggcgccgctctgccggttttcttccgtgcttctctcataactccgcagtcatgtgcgacgtcacgcgttgtgatcgggagccggggtgtgagtgtgtgtgtgtccacctgttctcggcctgcggcgggcacaaaaaaactcctggaacccttgtttttagtgtcggtcatgcgtacctcccctcgttatcgcacattacaaggtcacacgatcgcaataaaataacgactcgtcgacggcgcaaacagcgttggtagcagggtttgaagacgcaaaagtcacaagaggttctagcagttgaagtgtgcaagtcatgatgcgtccggggtccgggaatgcctcgttgaacacatcatttcctcccccccgtctgctccgatcggcgaattaaacagtcgatgactactagttccaatcgcgtcgaccgccctttgttgaatttgttgtcgtttcccacccctggggctgcatggaaacgagcggcgagttcaataaaatgtcgcagcagcccatcctgcccctttatcgtgaatttgtgcacgcatgccggtgcccgatcctgttgtcttggcgttcggaagatctttaccaggatattccaggatcagcgatcaccaggaagagaaggtcgtcttcgattgtgaccacgatacgtcgcccatgtcattcctttagaacggtacggctttcccacagcaaacacctttgaacagcaacaacactccttttgcatacgacgtgatgttcagaaccacacccagacgatacatttaacgagaacatttagtaaacggcggaactcgcagttcgagaaaaggcatcgcaatcatttcctgcctcccacatcggccaccgactgctcatcacgaagcgacaagttcagagatccatcgcctgtagtagcgtacgacggcacccacatcaccggatcagaccatgtcaaaaaccaactcggcggcaccgtctcgtcgcaattcatttcggccgcacgaagacaaggacgctgatcgatacgaggacgacagcgtgtcgcccaagtcgagccgtccatcatcgcggcatttcgaaaacctgatcaatataccgagcgatgtggtacatcactttagtggtcccgacgaatcgctacgtgatcacgacccctccacctccaggagacgttcctctttgttttctctgcagttgcctgtctctcgacgacggatggtcaggctcagcctcctgtgttccctcgccatcctgttcatcttgacgctcagctcgggggctaggaaccggagacgatcacggttgataacggtggccggagcgacgagctatacgaatctgggaggttttaaatggcctacctgggtagatgcggagttaggatccaggttgaacagccgaggggcaggttcgcagagcggacccgtccgtaaaggtcctttaggcgggaaattgagaaggggtctgcaagatctaggcttgatgccggtgttcatggatggacagagtgatttacctgccccgcctgcttttacacctcaaagacggttgaacccgataaccacaccgcctagccaggtggaagctcgagaggttgctgaagaggtcagacgcgcggagacggaagaggaaggggacacgatgccctggttctgggggaacacggacgaggtcggcgcaagtccgtttgatcattggcccgagctggatctcgaggccggagaaaagggcaagcgggtcttgttcttgactggtgagtcgcggccaacctcgaaaggacatcccattcaacagcggctgaatttttttgcttttcatgtcaaacccagactacaaggattatctggagcgcatgaacacgcatacctacgagattgtcgattccgctttccgccaccctctcatcgcccgcgtggatgtgtggggtccaggatggaacggttggaatccggacatcgacattggggagaacgttcggagaaggttgtggagggtctctgagattgacaaagtcgcggagaggaaagcacaggaatctcagaaagaagacactgcagagcaggtcattggtcggcagcgagaagagaacgattgggccgggatttggaagcagccagacgaccagattgctgtggcagagcagaagctcaaggagagcaccgttgaagacggcgtcaagatggggaaatggcttgaggagatcggggaggtaccggagggttgtcccgccgagcgtttcgacctggtctggaccatctcgtacgtgaacctctgagatgtttcgcgacatcacaaactgtggctcacgtttcctcttgtgtgggcgcagcgatattttcaagcagaatgacaagcggctatctcccataccatgtggtgctcttcttgcgcaacaattgggcgattgccactcgctcaactgtttcaaagaatggtatccgtacaccagtaacatcacggtcacaaaatacgctttcgagatgctggacatatttagtccggagcggctcaaagagaaatatccgagcatggacatgcacttgttcggtcatagccccgattcggccaatcaatgggacttttatcctgggaaatggagcgagcgcacgcatgaggcgcagatgttcggcttcaccgggagctgtaagcatcatatcccgtccgctgttccccgaccttgaaactcatcaatttcgctgtcccagtttaccccttgcggaccatcgtgacaaatgccatccgtgaccgtaaagataccatcgtcaaccgctttgagcatcccggatactttgtctgggaagaccctcaagcgtataaggacccactcgagacgtacagcgtaggccatccatattacaccaagcacatccggatgagagccgatttcgcggatgggctgcgggacagcaagatctgcgtctttgattcgagcttggaacgtaaactcatccgcaagtatgctcaggcgttcctgagcggttgcgttgtcgctggagacatcccgactgagcatgaggaagccctcgaaaaatttatgatcaaacttcacccggatgctaccatcgaacagatcgatgagaccctgaagaacgcattgctggacgaggaggaattgaagcgaaaggcctttttaggattcgcatatgctcgcaaatacctcacaaacacgtgagtcgaagtcttcgcctcagcgttcaaagatgggacgtgtcactgaattatacattcgcttgtagtcataaaattacgcaaatgctccgactagtggacaagcacaacgaaggagctcgaggctatgaccgtgagatcaccgattttgtcttcgtatacgacaagaaaattaatcccgtgatcgtccgcttcagtgccctttggcttctccttgcgatgtcgagcatactggagtaacgacgattcgcatcgcccgtaagtgaaacaacgggcgtacagattgcaacgccttggggctaaccggatccacggcattcgctacatagaccttggtgccagggttatcgaggcctagaaggcaagtcgcagcctggttgagcattgactgtgggaagttttcggaagaggttgtatcattagctgtgtatcagtagcgcgtcatcttgtatccataacactagcatgctcttaaggcttagagtaacaaataataccagggaggcggcagatccattctcatcgataccaaaaggtctctagggcctacccaagggcatcggacaaagtcgatcgtgtatctgttgcccggtgctttctcatgggaccgtgaaaccggctgatatccgcaaacctattggagaatgaatttgattatgattcttacatctgacgatatcggcaaggttccctgatcgacgagcgctccttacatttgaaaccttcttgctgtgagaatcgagggacacagaagtggacaagcagtatggaccgcacgagtcacgaccactagtgcatgctggctttcgtgcgaaggagagacccgtgagcagtcattagataaagctctcgtcagatgatgcgaggtgtataattcaggtatcgaggtacttgttacagagcataatctccttcgttggctttggtctcgcccccgacccagccaccgggtcgatcccaatctccgctcctgcctccctctttgtgcgtcaccatgagatcgctcatgatcatatccttgccagccaccgctttgaccatatcccatacggtcaacagtgacacggaagctgcggacagggcttccatctatagcaagacgagacctgtgagttttgaggcaacacatgggatgacatgttcgatctgactgacctcgacgccggtcttgccttcgcattcggccactgctttgaccgagacccaaccgccgcccttgtcacccgtaccatccgcatccatccggaaagccacctttagatccgtcaagctgatgggatgacataaagggatcaaatcgctcgttttctttccagccatgattcctgcgatccttgcagtcccaaaaacgtcgcccttcttccaagtcgagccgcttgggtcgtgcgacagcatctcgaaagcgatctggggcaggtagatgcggcccttagcagtagcccgccgagtagtggacgttttgttcgaaatcgagaccatcgaagcgcgacccgtcttgtcgagatgagtcagagtcggcgcttcagcctggtttggacgggcgtttgtatgtttgtacctgatggctagcctgccgatgattttggaatcgtagacgaggctttttgatttcaccgcccatggcgcaggacgcagaacctgtctaggcgtcctcaataatctatgtgatacagttccacgctctaacaagacgggaacaacaatcagccttgatatattcaagatgtcatgaccgagatcgactcacctgcatgaacgttcatccgaacgagcccaatgatgcccacgatacaacaaccaagcgatacagtatttatttcccgtttccaccaaagaccatccatacacccatgcacacacgcacacacgtttgccgaagatcaacccccgatcatgaccatgctccgattccgcatggacttcaacaggtccatacctgcgtgtttcggcttcttgttgcccacggccatcgagatgacgtcgatcagcctttcgtctacctgttgttcaggatcttgagagcgcatgacgtcacgtagcgagacctcggtgttgtcgaatagacagacctgcagaagaacgtgccgcaattcgctgagtatggcctgaacaacacgcggatgacagggggctcaccttgaggtgcccgtcggccgtgatccggagtcgattgcaagtcccgcaaaagtggtcgctctgccaattagaggatggtcagcgatgagtagtgtcaccctcgaccaccgaatctgtttgagcgagcgactcaccatactgctgataaatccgatctcgcccttgtatcccttgactctccacctcttgctcgtcccatcatccccctcatcgcgcaccatctccaagtccgctccgtaccgccctttcaagacgcccaacgcctcatcgtagctgaccatctcctttttatcccactcgttccctgagaacggcataaactcgatgaaccgcacgctgatcggtcgatcccgggtgagttcggcgaatgacaagagttcagagaggttggtcgatcgggtgaggaccgagttgagtttgacggaacgaaggcccggtcgaaaggtcgagagcgaggggatgagcggtgcgtctgtcaagtgggacagggcgtggtccaacgcggccatgacggccgaatgacctcgtcgtcgagtgatcgcttcaaacttggcgtcttcgagcgtgtccagactggacgcccccgtagatcgttgtcaggaccatgacgaacgacattgatatctgccccttttgacctgtccactcacctcagattcaggtgcgtcaatccaccattgaccaggtctctcagtttcccaccattatcgcttctcccaccgagagcgaccccattactcgtcattccaatgatccttaacccttcgtccctcaactgtcctattccacggacgagctctggtaagcctttcctcagtgtgggttctccgcctgtgagcctgatcttttctacgccttgagagacgaatagtcgggatagatgcatgatctcctcgtttgaaagtatatgggagggaggggagagcgggactccgttggctggcatgcagtacgtgcctgtgcaagtgtttgccaaggaatcgtcagctcggacgtgcacggcaagagagggggggggaagagggagaggggggaggggaggggaacacgagctcgagcttgtttttgttttcgattcacgcgacgcaagcagccaggaaatgaggtcctcagaccttttgttaatctgatgtgaacgtcgaaacaaggtcgaaagaaacgtgacggtcacacaagcaggctcatgatacagtacgatcgtacattcgtgaatacgttaacagagtcaggccacagagaagggtcgtctagatatacggcagtcgttgcgccaaggggtcagatataggaggggaaaggcgcggatgaaagatggagagaggcgggcttatggtgcctagagtcagatcagagctatgaacctgacaagcgtggtaatgaggtcctgagcggttggcttgttatagtggtctgtgaaggaagatcgatcacagctgtgtgtgtgtgtatttgtgatgatcgagtgacgagcatattgtagggaccatgaatgaggaggactcggctggcctgtgcgagggtagacgaggcttaagtaggaacgcgtgcatagtaggacgtctgcggaaccgtcgagcttagttcagccgaaataatctgggaaaggctgatctgactgcaagtgccaggctttgcactgaccttgctcaaagaatgatctcgagcttgtcgtgcgggtctgggtcatcggaaaccgaagtcgcaggcgtgttcgtcttggtggcgtgagcctcgtccgtcgtggtcgtttgactggccgcactctcagcttcgaggcctccagggacagagttcgtcaagcccgaagcggcttgtaggtgcgaaggggtcgacctcattacgtcccggtggatatcaccgacaagcttgtccctggcttgcgaagatagatcacctccaggcatcccaaagggcatctcgcccgtgtaaggagcggacgtctcgccatcacttccgatcgcagaaggtcgggcgtcaggcaagacccattgtcgccactgttcatgtgccaaccggatgttctggtcgcacatttcgaggatcgtgctcatgccggctacttccttgacagtgtccgcatcagcggtcaacgacttgatcctgttgaaagaggatatcatcgagatatcgacccatccttgattgtccatctgctcacgagtaagcacgcggttcagttctaaacccacggaaagcgactttcgatatcagcggctggcttacttgttgcctcaggaagaaatccatcgctagattttgcatgctaaagtaatactccagttgccccaagatgaacgacctcaaggtgtcaagcccagctatttgagtcacgggacgagggaatggcgccgcgccgccgccgtaattcgcttgtccatatgcctcgagatttccatctgcgggtggaacgaatcctccggtgatgataggataatggtagggagaaccatagtagggttgcgcgtaggagtagacggcagaacctggcgaggtttgaccttcggtagctcgccttccaaacccttgagcgatgttgtggttgggcaggctgggtgaccgtcctgtaggcggggacatcagaggtgagtgctgttcagattgagaacggcccaatccgccctgtgaactgcctcctcggctccctcgggcaccacgcccaccgcgtccacctcgactctgtccattcgcgttggcaggtcgcaagtggttttggttctgagtcgatgtccccgcaacggagttgatctcctgttgcggcgggacgatctgcgctttgtttgtcgacgtcgttccgctaggatgtgttttgccccgttcccgatcaaccccagatcctttctggcgggagggcggcgatgcatctggcagcaggccatctgagaggaccttcggtgtggaagggacgtttgttgtggcgacagcgttgtgctccggctccctctgcgtttccggcttttgacctgttgaaatcatgctgggcgtttccgtcaagttcaaagctacctcgcctgctttctttaaagcgggttcaacgagcttgttgatagttgcatcttggttgcttcgctcattcttggccgcggcagctttggccttcttgctcatctcctggcctgcggataaactacttgatcgtgagggtttcacgctcccagttccggccgtggccttctttgcaccagccgcagcgggactgctagctttgccgtttccttctaccgtcgccgtcgaggacgctttcctgcttttggattcagctgcctgctccgccttcttctggcgctgcactcgatccaaagcctcttgcatctcggctgcagggattggggtccattttgttctttctgtaagtcgaaccgatcttagtaagacaatgacccttgaatatgctatgatgatgctggtactcactagctaccgtgccgtgtgttgtcgtctcgtccgtatcgttcacaggttgtgcgctgggtctatttgaagatcccgcattggcagctttgctccccacagccgctagagccacgtctggccaagcggtagaatcggcaagattgggcagtggaacagcggatttggactctcctccattctttgcgttctttccgccgacttttgtggaagctttagaatcggcggtcgccttcttcgggctagcgtttgcgctcggagtagagaacttggcgagtccttttgacgcggatttcgatattgccccaggtgtcatcgaaacggaactcgaagaagatgcagcagcgttcacagggcgcgatcccaacatcttctctttcctcgcttgccagatattcacaacgggtggacggacagattcaggaggggtcacatccgggagactgacgtctgaggcctttggtgattcggcgggtggagtgttatccaaaccatcctttgacatactctgagacgagctgggatccttcgttgtgccagaggcgtcccgcagtgactcggcttcgtccacgggcatcgaggggactttcgacgttgctagacttctccataccgtcctcgctgcccctcggggcgcggcctccaaggcgctattatctttccgaccagaagctgcagcagacccaagttctgctgacgacttgcttcgactggcagtcatctcccgcttcccgttcagcgtcctgagctccatcgcccctttgcccttgtccgctctcggctccttcttactgcgtgccgccacttcttgccattgtaaggtgtcgccctccttatagttttcgtcgcgggatgtgctacccttttcgctcgcaattctgccggttgctggtcgctcagagctcatgtcggcagtatcccaagacttcgtgactccgttcgtggaagatgccgctcctttatcacttttttctgcatcctgttctgaagcgtgttgacctttgcgtatccgttcggcataagagagcgccttgaaggtagatgtgggtgatgtcgcttcatagggagtagacatttcgatgaagtagttgaaccacctatggtctatgaggcaaaagattttagcataaaagtttgtagtaaatgctcgagtattactacctagcaccctcgaaattgcaaaataacccctaagaatatcgatacgtacggaattgagccttgccccaaaagcagccttgccgtagtaatgaaggttattctctagtcagccggaatgtccaagtcttttccgcttgtagagtacgattctgtgtctgtcgtggtcagaaagagatcaagctctggcgaagcgaccgggactgcaggtctcgcctcttcagccaggcaagttgatcgtcttgataacgagtgaattcgatacccggagtttcgaggaggatgctgaagtagccaactgtattatctaggccggacgaggaagcgggagatgatgtcttcttttgtagctgacgtttgcgttgctgatgtaggttggctggtctgtcgtaagatgtagaagaaaggaagaattccgggttgcaaagtcggaatatgccgaggcgaatctcagcaaggggaaggatgcctaaccgtggaagaagggagcagcggagttcttgcacagactgtcactaccagtaccgtaggtctgttcgggggtatggatgagagccacccattctgagactttcacagcttctctgtaaagagtcagttacactttcatccccgaggtggattcgaggaatgcctagcctgccaatgtcgcccttagaggccatcactccgcgccgacacgtgagaaaatccagacatctcggtcgttgcctaccttcgcgcttgagcgatgaattcttgcaagatcgatttcgatctcgaatcggcgagcgctctcgttggtgcccagacggcttaatatgataatggtatgatagggtcgtacatgatgaatcggaagtctctacagcgctcatctataaccgagctgttcgtcttgtcccgttgaaactcaatgagcgcgagaatatcccgggggtgcttcattgtgcccggcatggctatcatcgctgtagaccggtggagctgatggtatccccgcagtgagatgatactgcatatctggcggagaggagggtgtcgtcgtttcatgtgctgtcgtagtgatcggtacgggtccagtcgcagcgattcctctcgcctcggccgcctcgctgtctgcaaaactgggcggtgggagaacctggcgatttccactgctcttgcggtttcccgcctcaccaggcgcgttgggacccatgacccggctgaaagcgggcggcggagccgattcatcaagtgggccgctggtggccatcgcggttacctcgccaactgaatgggcggcgcgccgttgcatcgctcgaagatgatgaggcatgaccgcgttcggcagagatggtaggctcggttcatcaaaaccgggcggcatgtcctcttgcgtgtcaatgacccttgtgccttcgcccagccctagatgttccatcagtcggaccctctcgtccgctccgcccagagccatatccccatgaacagcttcattgtcaacatcgtcggctgacggtggatccatcgatccactaagacccaggcttgcccatgcagctggaggaggggccgagaaggtctcgtatccatcatactccctccagccagctagttcgccagtcaattgagccggtgtcggcgtgcgaacggatccagaagtcgatgcgcgagagcccggtagcacatcggcaacgaggcgagattgattgtgacgttcactctcatcgaaggaaggcagagcatcttcgctggacccggtcgaatctgaaaatggcggaggatccgcttggtctcgttcttcggataggtgtggctttggttcgaatggcggggggttgccgctgcttgaagtagcgctgaggccttcttgcctaaaagtacctgtgcttccgacaatatcgctacctttgagcctataggctctgttacgcgcatcttcgttcatcatggaatctggcattccgcgcacttcgtcttctcgcaaagcttgtgcgatggccagacgatccgagccgtctgcgtcggtcaccgtaacgacatgaggcagtagctgattccacgtgggaggaaggatgcgaacttcttgctcgaggacgacaggatccccttccgagattgcgaacggttgcggtcctgtgctcgaggagccacttgcttgtacagatggagtgctggtccctccgccccggctttcgacgatgatacgaacgaaaaagtcgacctgatggcgtggcgtctcctgagagacgtcaccgcacccgacccctcccagagatgctgcactatgcgtattgaagagcacgtttcgaagaggtggcaattcgaataacaaacggataggtctctgtcggttcgaagagtagcggcacagcttgcccgacttgtgtagcagtgtcagtgattccctttgtcgaaatgacgttccaaacgagcccttcgctggagaatgtctttcttcgtccgggacgattctgactctcctccaccattggattctgactcggcggagccccttcagccacttaattgattcctcatccaagtccttcgattccgagctgatctcaacgcctacggcgattgactcggtattgctggtctcgaccgtgctaacgatcatcttgcaggcgctgccagccgaaatatgggaatcacggccggtgatggtgctcgtcgcactcttccaattcgagctagatgatgagcttggcccagcttgagggaaattttcatctccgattgcaggcacagactgcgctttgcagggggtcagatgaatttcgacgtcctcctcgacctgtacactatcggagatgtacggcggtccgcctaggtgcgctttcggagtggagagaagattgacgcctcggacccgtacccggatgtgccaaactacctgtcctagacctgcttcgagcaaatggatgcatccaggtaaaggcaaccccggcaggacggcatacccaagcgggatcgagaagggtaggccatcgttcgtatctaatgtgccgcccacttgtctttgcttctcggaggaacgtatcgatgcaccatcttctgggtatgtagcagcggtaggtgagccaggatgacgactgctttcagcatggcgatccaatgacgtggcgagcactgtgttccaagcggaagaccacagtcgttcaatggaaccggaaatgtcctcctcggaaagaacaagagaggcttcgctagttgtagcaaaacgattcccgccgtcaataacggtgcggtctggcaacgatacagtcacaactcacacttggtcgagcttccaaccgtgtccggcagctttgacgtagatcagtccgcctacggattggccgtccagatagctaatcctgtcttcgagcggttggactaggatctgtggactgaacgaggaaggtgcatagccaggaagctcaaggaatgctgggggagaagttggcactcgctcaaatggtggaggctgcatagcagtatgtctaaaggaggaccttatcgctactcttcaagccggagggtatgtgccggtgagatacgccaggctggagattggcccgtcagatgttggttatcaataatgggcaagcgtttccgttcgatccagtgtggggtcgtccgcatgatatgagatctgagaggcataaccatgcatagcatgtcatgacacgaatttctccgatctctatcgctcgctccgatcttcctttcaactttacgcgctcagcgggcatgcggcgatgttcggtcgatatggcccttcatgagaggggcaaggagcgccgacaagtgatcgtgcggagatctacgatgaggtattcatcgagtggatgctttgattgacatgatcttacatgttgatgcttaagtctagctgagtacaacgggggcgtcaagtcgctcggatcggctcatgtttcgcagcgggttcaggacttgacgtgcgatcctgcggccgatgctaactcgtacgcggccactagcaatagctggccgagcagatcgattgcagccgaatggatcggaagggtatacgagctgtatcgcaaagagggctcagatggtcgggttgagatgacaagttcacgctgaaacaactcactctggatctaagcctttatcccagaagaacattgtgatttggtgtgccgcccatatggatgctccagcctaaaagaggcatgtgacgccgcgtttgttggtccatgagcgggcgttcaagtcacaaggcagagcgagacactcacagtcaatgcgtatgagacgaggaaccagagtagcaaacccaacgggatgatcgtccatccggtacaagcgataaagattagaaagattgcttgcacaggccatgcgctggcaaacagagtcatgccagatgcggcactactgaggcgtccagccacttcgagctcatagtcacgggaggtgatacgatgttctcgagcgtgttgatccacgtgcagatcggtcgagaggcgagatgcactggacaggcataagatgagaccggcgatctgcacaaaatgtcgacctttgcctacatactaaatcgctccgaggcttccgcagatacccgtcattgtgactccgagcaatgcgaagccttcatatcttgaaacgctcttttctaggacgacaccggtggcacaagaaataagcatggctgcaacctatcattatgtggtagaagtttgcttagcaaagcggtgtcaagcagaatgccacgtctactgaccagtggccaccatgcaccttcctcctctgcctcgcttggtttctcttcgaggcttcgtgacgactccttgcattgcagcccgtaccaacgcacgccgacagtagcaacagccatgaccaaggtcacgacagaaggcacgggacttgaaattccgtggaccagagcgcttccaactagtgcgaggatgaatagcgtcaagaagtcacccagacaagccgccaatggcgaggcaatgttgtctaaggcgtatgaggtttgtggttagccatagtaaaggaggaagctgattgcatgccagacttgccaggattgagaccgaaccatcgacagacgaccacgagccaactgataaagttgcctagaacggcagaactcagactcgccgtcagcatgcccgtgctgaggatcaacatgagctgcttggctccgggcttggtgtagccctcggtgatatcttcgcttcccggtatggggactggagatgcgatccgatgtttcatgacatatcctaacagccaggaaagaccgccggccagggcggatatcgccagtgcttgatattgcaagaaaaagagggagttggtgatgatctttttccgtcgctttggggtgtccaatcgaccttcattggtctgtatcgtatggcagctcaagcttggtcagccctcccctaaagatacgtgcaagaatatcgtctcgagacctacagcagtacccaatttggcccccaagcacatttccaggtttcccttaaggttttgtagagctggcacagcgatgaacagttcgtcacatttgacgaaaacatcccatacggcgaggtgatctaacagttggcccgtaaagatcaagccgatcaacgatacgacgagagaaggagtggactggatgagcaaggaggatgcggcccgcagcacgtgcgtcgtcgagacaggcggttggttggtatattcggcgagcgtatccatcgattcggatggcctaggcggatatgtcgcattgctgccgatactataacgaatctcatcgtcacggggattcttgccatgatttcggtcgggttcgtgatcagagaagctcgagtcgtcttgatcgccgggttcgtgggaacggtctaacggcggtatatcgagactagccgaggcttcctgcgaggagagtcggtccgaaggacggcgaatccgaccatgatctaattcctttttcccccatacttcttctgcatcttcttgatcttcgtaccggacgactcctccaatcgctaacgcttttttgcgatgcccggacctgtatgcctcgtcgtctcgccggacaatgggggacatacggttattgcgagatgaaggatatgaaaagacactatgaagcggattattggcgagcttggacctgatcctgaagagactgctagagaagaggatagatacgagacctcgtcacggctctcttggatgtcgaggttgtctagagggttcgggtgatttagcatcgctgatctcggttagatcgtttaacacgcgcggggctcgtcgcgttcggtcaccgatcaagcaagcagaatagaccggggagacgcgcgcacggaaaactacgcatgagctctacatcatcctaaatattatgaatggcattatggctagctaccgattgacagcttgatagccgcctgcaagcttggttgcatcttattgtacacatcgcgcagctggattgatctcaattaaaagcgccattatagctagagtgaaacctgagcctggatgaccgaatagttccgattgtcaacgtcgaactgatgatgtctcaaatgttggccatgtgagtgagcatagatgcgtttcgcattccgttcatgccaccgttgtcgctgccagtaacgttcatgtcgtccgggtactggtcgggagtactagaagcttcgatctgttcccgcgtcgtgcttgaggatccagccatactggcaccgcccatactgttcaagttcatcggaactgcaagatcgacaatcgctatgatcagactctgttttgaccatccgctcagggttctgcaaagacttaccgaagaccaccttgctgcccgaggtcttggccatgttctgaagagcatccaactgtcggatctgcatagcggccgggctggccaagatctacgcaagtcgcttacagtgggtcagcggatagatgcgaaaagtaaagtcgcaggtacttacgtctgcagcttgacgcatgagcttggcggcatcgacttcagccctggcggcgataaccttggattctccgatacgcttttgggtggcctggaaagggggatcgcgagaagctcagcacaatgaaaccgcgccccagacgaggcaggtggaactcacagcactggagaaaaggttctgcaactcctcggagaaactgaaaagataattcatgtcaacctcccccatgtgagatcgtgcgcaagccgccagccgtaataaacctacgtgatgtccttcaaaaggatggactcgatgttgacaccccacttttcagcggtcgcctcgagctaaagccacgaaatcgatcgctcatcagttcgaggtcccgccctcgcgattgtcgtgtgcgcaactcacaatctcctggatttcggcagcgataccttcccggtcggtaatgatcgtctgaagcagtcgactcccgacaacctgcctcaaagtggtctctgagggatgccaggtaagccttatcagcaacagccttgacgtgcatgattacgcttgcgccaactcacgagctcgctcgaccagagcagtcctgacatcggcaatgccaaaggcagctcggtaaggtgataccacgtgccaacagataacggagtcgacatcgactgtagacattgagcagcaagtcagattttgcaggcaagttatgttgagactgtcttggaagactcaccagagactgtaagcatggttggatccacgtaccacatccaatcagtgatgctgagctagcacatgtctccataccgtcactcaccgttatccttggtcataaccgcttgcttgggaacggtactcagctggatcttgacgtccaccatcctgatgttctcggacgcaacgttgaccttgactagaccgggatccacagatttgtagaactgtccgaaccgcgatatcagacccacggatccttgctcgacccgtttgtaagggttggggaactggtagcaaggagagctcaaatcagcatgaccctggcgaacatgacgcgtcttgcctgctcacgggacagcagggaaccgatcccaagtacccaaggcagtctccgagactgtgcatgaatgttccgtagaacccatgttcagtcgaagaggctccaagatcttgggcgtatgagggttgcattctgacagtgccgaaagtatgtgtcagcaagtttcggacttaaaggtagaatctgaaactcggcgacttactcttgtttgcgcagcggttgtacggtctagggacgccaggtggtcagcttaatccgaatcgcggctatcagcccttgtaaggtattcacgatcaggggtgcttgagggtcctttggacctttgacatggtcactcgagttgccgtgataaccaccgctttgggcgagggtgataccgggggaagcagctcgaggggggtcgtccgaggtaacggcatcgtatatttcgttcgagttgacgttgctatcgtgaattctcgaagacattgtaatggcgtacgtggaaggtaatgtgttgagaacttgaagggtggaatctagtggttgtgactagtagtcagaagagtataagaggaaagattgaatgggaatgtgtccgatctgttgtcgaagaggcgattcgaccgagccttatatcatggttgattgacggtccaaccttggtcactctcccgttcttgcgcgctaatgatctgccatcggggatcgagcgaggatcggcatatcggcacggaagctgccgtcttggcgatgcacaacctgatgcgactgcggaagagctcttctttcgtcccacgctggcccctccctttgccgcactcgaacgaccaaaacgagacttctgctcggcatctacacttgacgagtgtacgagtgtacacttggtaagggagcagggggcgtgcttctgccatgactatcctccggggcgtgaccgtgatcagctgatcgatgatctcacagtctagccggctcctcctcgccttgacctgctgttcctcgcccatgccccattccttctgtgcacgcgcgccgaacctctcgccgctcgatttagagtgtatgtacgagtagttatgatcccgctggagtctcggcacaactcacactacacgacgtctcgtgaagcttgaagtcagagcgaggtgacttcgggcattgcgtaccaaacacgctcgcggatatgctgggcctgattgtggacctccggcggcgcttcaccgaggcactgacggctgccgactcagtacttggcaaaccttgttcaatttcgatacgggactcttcttgcgtatggtaccacaggaaccgtatcttgtcaggcatcgcacactattatcggtgccggtcggatgattttgcctggcatggagcaacaccatatgacgtagaatcgccggaactgcacctttcgcctatgaccttgggaccgtgtcatccgtgacggggtcctaagcaattgaccagcatctcccctcgcatggtgtcaagcgttctgtcgagtcttgctctcgagcaagtagtactgaccctgttcgttgaggagacattcggcaagtgatcggaaatcgtcaggaaattcaggagcacattcgattcattacaatatccggagtcctccggcaattgcagatgaagctacaaccgtaatcggagtgcagataggagatggtaatgggagttacccgacaaacggccaacgcaacagttgacacagcaagccttgtgcatccatagtaaaacgtcggcttgccggcacgacgatacacatccagtagccacaccgcacagcattctctcatgtggtttatcggtttctgtgagtcgcctaccgcacagctctatctcggcctatgagtcgctcatcagtccagaagagctttacagcccagattattcattggttggattgaggatacagctacacgagtccctcgaacgttctagagatactgcaggtcggcccgtgatggctcggatcttggtcctgagttggtcctgagctgaaccgccctacccatgattgattgcactcgcctctcaccttccttacgctagagctacattttcgacgttgtggttcacgtcggcgctcgcttcattgcagaaggtctgaataccatccaggtccgtgcgacttatccgaccccggctgctaagtagatagatcgaacgactgcgattctatcaaccttggcaaggtatgccctgacacagcttgctagtagcatcaaggagcccacatgagatgcgtctaccaatatcgcctagactctcggctgttgagatgggtggagccgagcagggacgctggtttccctttaccaatgttgtacaattgcatctgcttggtcttgaggcgtgatcaagtatacaagttgaacccgtacatagctatccaccgaatagatgcgatgccttctgataccgtgcagaagaagcctcgttccggatccccagcgagttgacaatcgaagtggccgaggcgactatccgctcaatacagtgctgaattggagactgcaatctccaccctggcctatccgtctaggcctgtcctttggtttggaaaaacaccttccaccaattcctcgccttgccttgccccgccctctcgacaccctgtactagtcgagtgtagtaaagcgggtctgttggtgggctgagcgtttttggggacaaggggtactgtagtaggaaagaggcatcgatcgggactcgattcagtctggtaccactggtagatacgaagatcaatttcaatcgctcacctttcggaaagccgtgtcctgtgtgatctcttgcatcgccttgagcgaccgatccagacgggttagatcgccgatcccgaatcctagcttagccacttcctcctgcgagagctccttgattgtgctcgccttcacggcctcgctccctgataatggtgtaggacgtctgaaagccctctgcaccaaagtctccaaggtctcggggagttgcagagatggtcttagaggatcgcgaggtatcgatcgagcggccgtgagaagggacgagtagagttggggtaccgagacggagggaaatgctggcatggtgtatgggtgtgtgtggagggaatacagcgatctgtcaaggctatctgatggatatgtgtgtgtgtgtgtgtgtgtgagtctgactgcttggacaaaggtggtttgggttggcgagatcatgtgtaaagtgatcgatcgagcatgtccgcaacaaccgtccacacaactagatgatgatcggggcaaagtttggaaacgcgcgacctccaccttccctgcaccttgacagggtagggtaggggagcgagcaaccagtcaacctcgactcatttgaccacacccatcgtcaggatcgagaccacttgctcacttggtctactgcaaatctgcatcaacagcaacaccttaggccatgctatgccgagctcagtatgagaccatatagatccgagaaggtagcgtagacacacgaccgaaagcacaggcagaagaacgacgggttcctccacccagctcgatgcctcggtcgactaatatacccggcccatcaagcaagagaaaggccgtcacgatagagatcagctcggacgatgacgtcccaatcgatgaactcgtctcaggacagggcagaaagacaacggtcaagaagccagagctcaagagacctagcgtacctcggaggagcactgctggttcggctggcggttttggtggggtgagactatggctttgagatcaaggcagtgggcagcattgtcaagcatgtgctgatgttcctgtcccgaatccggcagttcgtttccgctttcgactcccatggctctcgtgatggcaggtctgtcgagagcggtccatctcgtggactgcagcctcctcgagtgcctcaacttgacaactcagtcaaggtgacggctacggtcaagtcgacggcatcagggcgatcagcgaagcccaaactcaggttacgggatgctggggaagagccgatcgttatggacgtcgattcttcgccgaaatccgcggatgacgacgccctaacctgggcaccgagcgactcggaaatagagctcgtgtcggctactatcgcatccagacctaatggcaagccgataaccaaaccaaatgttggaccgctaggtttggagcgtggtacgaagagaactcgccagggtgacaagaagatgtacgagaattgggggccagacatcgataatccggagtcaagctctatgtggactgatgagtacgccccgacgacaatagtgagttgcgacgtatgaggtctccgtgaagcaagtagacaaacgaaactctggtcacaggcagatttagcgccctcaaagaatagaatcaaccaagtcaaagcctggttagaggaagctctctatggtcggccagcagggttggaagcgacaataacgtttagcaaacaggcggcagaacgggtcaagaaataccgagtaaggctatttgtcacggcacgctcttctggtgacctatctgaacgtctcaatctctagcgcatattgcttctgaccggaccagcaggagttggcaaatcgaccagtgtacgcgtcatcgccgccgagatgggtgtcgaagtggtggagtggaacgagggcttcgaggagtggggtttacgtggagatgtaggtaagtcgcgtgaaaaccaactccatcgtcaaacacctcggctcatcaactgcgctcgacagaacgagaaagccttaccagtaaactcatcacgtttttgtcgagaaactcttactccccgctttccatcaccgaagccagtcgtacccacaaatcgcattcgaatgccattggatctacggcgaccatttcctcttcatatccaccaccacgacttttactcattacctcgctaccgaatctctcgcattatccgacacgacaagcatttcatagcgctttgatcgattacagcaaaactcacagttcaaacagctgccccttgatcgtagtcattcctgacgtgggtcaaagtggggctgcggaagagccttggagcaacagggcgggaggcgcgagttcgtctgatgcgtcgtgggatctcaagagcgtcgttggggaaacgatcttagctagtcctgctgtgacaaccgtcgagtaagttcgagcttgcaaattacgtcataatgtttccttcatccaatcgtctgatctaccgttcgtcaaagtttcctgccgatggcaccgactttcatcggcaaggctctcaagcgcctcattacgctcgctattcccgccccatcagatcgccctagtaacgatatcgtgcagctcattgctcaaagctccaacggagatctcaggagcgctgtcaattctctcgagatgttgatgaagactagctctgggtctttgccgaccagtacaacaagcaagagcgccttgccgaagaagggcaaagggagtcgtggaggcggcaaaaccaagacttcggggtctaaggaaatgcagacactgcaagttgggcttgtgcttgatcacagcgcacggttgcttatcgtttgtttgtacaggctcaatcagatcgctcggcgggaacaaagtcttggtcttttccatgcgcttggaaaggtcctttataacaagcgcaagtctgggacatgtcactgtaagcgcgtgaatatgcatctgatccttaattgtaggcctcggcgatacgaccgaagatggcgatgacagtcgtgcggcgaaagcactggaagaagagtacatgaagacgaacccactgccagcacacttaatccgccatgccaggcctaggtacgagaacgatttcgaggtaaataccggccgagccgtttccctgtgctgccgaagtaagccaactccccgtattcacgctataggccttgttgaatgcggctcctctggatacggcctcgttcatgctgtggatgcatcagaatatgcctcagttctgtgcagacataggcgagctggaccactgcatcgaggcaatatgcgatgccgatagcatgaagaccgacgatgatctggtgaatattcagtgaacgggtcatgcccgcttctttgtactgaacttcgaactattgcagtggcaacgctcttcgcaagccatagcttacgccttccatgtcgctgtacgtggagtggtcgcaggcctgccatcgcctgtgccaaagtgagtggatatcgcatccctttggacagccaatgtgacgttgacaactttgacgaaattacagaaaccaacagaaaatgttcaaacctgacttttttcggtggatcaaggccggaaagacgaatcaagagactctagccgagacatcgcgctggttggctcggtccggcgaatcttcgcgacatgaagataacctagtcgacctacgagggactgctaccaacgcagatgcagactcttacacttatcgggggcagcgatcgaacgcggtcttggctaccgaatatctaccgatgatgcgtctcttgagacgacacggccatagtgggtccccgtgccgggaatgcttgttgcgaaactagcgatactgaagtagactgattgtcttcgtcgatcagacgtaccgctaggtacggattacgaaccatttacgagcttgaacgacagtacgaatgacctagatgttttgggagaaaaggactgcggtgccgacatttccattggacacgagacaaacgagacaatcgagacgatatctaccgttgctaccagtggcaggatgcccacagtagaagctatatcagacgacgaatcgacattaccgacagcaggttcgtatctacaagacgatgacatcgaggatgacgattagcgcctggatgctgtgatgcgatcgagactcatacgactacttgtactcagtaatatgattgtatgcagctcgaagcttgtcgctgattcggcatgtcgatgagccgagctccttccttcgcgccctcgtcggcgttgcgcgatccccgaaagcgttccattctccatcggagagagagagagaggaagagactaaaaagagatgaatacgccaatgaacaactctgtatggatcggtcgtagtccctcggcttcaaagaaaggcacagatgtcaattcgcaagatgtccacgttcagccgtctcataaggttcgtcccgcaggccggatctgccgccagccagcaaccccttatcggtcaacctaccgaccccaagctcgatgtaggactcgcgtcctatgagtccaaacccatcgaggtggacatctattccggcacttcggtgctaaatccaggagaacccacagggagaagagccacagtggaaaggttactgagtcccttggctccagaagaggtcgggacgatccgctgtatcgggttgaacgtaagtcggcgttgtcgttccaagcgggccccgacggcgaattcgggctcatcctttcctgagcagtacgtcaaacatgccaaagaggtcaacatgcctataccagaggttcctaccgtcttcatgtgagcctggatgtgtacttcagaacgctgcgccgtttctgactagagagaccttgatcaccgatcaggaagccttccacctccctggggggaccttggcccgaagagaccgttctgccaaaggcgtttctgcaagataatgcggcagactatgaggcggaactcgtcagtctctcgtgccgtcttgacctagagatggtgctgatcgcgattctctaccctgcctaggtaattgtcatcggcaaagaatgcaaaaacgtctcggaagccgatgccccggactatttgctagggtgagatgcactcaagctttcacaaccttcaggccgactcacacgccggttgtctctcaggtataccgctgccaatgatgtctcttcgcgtgtggcgcaattcgcccagagtcaatggtcatattcaaagtcgtttgatcgagcttgcccggtcggacctgctctggtacacaaatctcaggtcgaatcgattggacaaatgaccatcgaaggcgcactgaatgtgaagacggtgcagaagagcggactcgagtgagtcggtctgagcgagacccaacgactagaatttgatcatcgacgttgctgttttagcgatctcatcttttcggtcccaaaaatcatttcattcttgtcccaaggcacgacactcttacctgggaccatgattttgacggggtgagtcatctagttatgtttgatatagtgtccttctcgacactgaagtctccgtcgccccttgttcagcacgcctgcaggagttggctggaccagtgaacctaggcgggtgctgaaagccggagacgagtttagagtgacggtttcccatggtgtcgggacccttatcaacgaaattgttgaggaggcataaaatacgatgtcgctcgagatttaacatcaagggataggcccgccaatgggaatcgcttgcaacgattttgcaccgtgttcaagctgcctcacaccgtgaccttgagccgattctgtctgattcctgatcaacaagctgagcctagaactgctgggattcccgacgtggcatgctgttgcgggatcgtcgttgtcacagccctagccgttcatggtcttgagacaagaggatgcccacatatgatggaacatcgagcggacgggccgcacaaagttccctgctggaagattgtttggcgagctacatattacagtgcggaagacggaaagcagatcatgtttgtgaattaaaaaagagagagctggccgggcgagaagattcttgtcccgaccattttccgaacatgcgcgagggtaaaagactcagttcatgtctcatccactagtgcccgccattgacgtgggtgttgttggtcaaggcttcgtcggcagccatcaagtccttttcggtcaatcttcgtccgccgctgggagtcatggttcccgagatggccgagctgagcgagtcggatcggttacgagtctgcttcatgaccaaggggaaggggtacgaggtctcttcctcgtcgtcctgggtcccgtgccaagctgtcaagatgaatgtccgtcagataaagtcggcgcgcccgaccattgtatccggtgcatcactcacctcgtccgcccatgtaatccgaggtggagagcccttccatttcttcagtcaaggtgcctacagacgagcgacaacaatgagcatgcaaacctggggtttcaacgtcgagtagcgacttaccgagatcaccgggggtcatcgcgccgctcttgtacctgggacttccaggagcgctgaaaggcgcgccgactcgggagactccgataaagtcgggctcgtcgtcgccaaacgaatcggggtaggctcgacggagcgccaactgcctggccttggcgtattcgagaccaagggatttccaatcgaggagctcggagagtcgctcggtcctgtttcgctggttgatacgctgacgacgggtcttggtcgagaacgacaagagttggttggtctgcgaggcgaaggcgaaccgagttggcggtcagggccagggcgtgggacgtaagcgagcggtgatgttggacttacgagctgctcgaccgaatcctcgaccgactgggatcgcctgtcgacgatgtaacaaccgtagtcctgaatcgcgacgacgagtcgttattgatcagccatcggtccgtttaaaaatgtggcaccacctgcacgcgacctacttcgggcgactcaagcaagtcctccatgaagcaaccgaatccggacaagttggtcgtgatcgatgggatacccatcacggtacattcggccggagtgtaaccccaaggctcgtctatgaatcgggagcgcgagtctggagtcagcgtctgccgacaagacgacctgagctcggatcggaaccgtgacttacagtaactggggaagactcccaaatggcaacccctgacaaactcttcatagtccatgcccaagatcgggttgttcgagttcagaaactcggggtggaagacgaccttgaccctgtcgttcttcttgttgaagagctgagtcctcctgatctggttcaagatcggatcggtggcgtcgtcctgcatgttgtgggtggtgaccgggggcaacgagtttcgcttgagggcgaacactcgtcgcttgagcaggatcttgtcctcgtccgacaagaggctcttggggtcgggaacctcggttccgagctctccatcgtaccgagcggcgtgctcgaacaatctgtttccgatcctgttctgaatctcttggaccgtgtcttgcaactgcttgatgacggcctgacccttgagggcttcgatcgtgtacgagttggtggcggcgggcatgatgataaaggcgacgacggtggtcttggatcccatcttttgcaatcggtggttcagacctgtacgtcgtgcgatgttttgcggtctgtcagcagccgctttcacgcggcccagctcggctcagatcgatcactcacgggccaaactctcgaggaacatgtcgacacccttgttcctgtactcgtaccttcccgcggtgaacatgtagatcgtgttctcgaggtcgaagtcgtagtgtccgtaaaagtgacctcgaataaactcgttgatcttggccttggagagggcgtgcaagttctggaactcgtgcatcgcttggaacttgacaacgttgagaccgttggggaggactccgtctgtatagaggacgaggacgcgatgtcagtccttgcatcactgtacgggtagtcgcagctcgagcgtcgtgactcaccgggctttcgcttcaacaagtgctcgctctcgaaagcggtcacgtgactgacggtcgtaaacacatcggcacaatgggccgacgatcgctcgatacagtacctatggcgaacgcgacgagacgaggttcacattgcgttagcttcggtcattcccgctagggtcgtccccccgcgttcgtcactcacctatggtaaattcccctctttccagcctcgtgatcgacatcaaagtactgcagattattgtagaaatcgaccgatccggcacagaggtatcgtccgagcaaggtagcgtgggtggtaaagatggtcgtcacatcgatgtgacgttttcggcacaaggggatggcgagtccggcttgccattcgtggaaatgggcgataatggccgaagtcctgtggtgcgacgcaaactgcacgcagcaaaccccggaatcagtacctgtggaaccgttttgtctgctcgagccgacgagccgatgtgccaactcacctcgcccaagaaccaagcgaccaggtaaccgaatacgatcgtctcgttggtctcgttatcattgggcggggtagggatcccggccaagttccaaagatcgcccttccactcgtccaaccggttgtaggccgagccagtgtcaaagaggatgacgttgggcgcgccctcgatcaaccatcgaccgtagatgagcttaacgcctcggtccttcatggcctggagcgagagggcgagcggggaaccagcaggactatcaaaaccgcgatgtcgtcgtcgtcagtcgccttgccccactgcggggctcctctcgtaggaaggatggtatccgactcacggctcgacgctctctacctccatgggggccgtcttgtagctcaaaggtccgatcaacgtgtacctgtttccatattcggcgacggtgacgggagccttggtcttgatgacagtgtagatacctccgaccttgttggcgacctcccaagcgacttcaaagaggagggggtcgtgcaccgttcgaggagtcggggtggcagacatggtgaagggagagaggtggtgaggtatttacggtgtcgacttggacgaggggtagattttcgagagaagggttggacgggttgttcggcgagctacgtgtggtggtactataatcgttgcagcaagcgtcgaacaaaggcgccgggggagattcgaaaaggggttgaatagggtcagcaagctgtaactgaacgaacggaacgagcgggatatgtgtttccccaatggataggccgaattctccgtgacaaagaaggtcgaccgcagggtttcccctttgacatcatgctcccgatagaaaccctttccgttcgttcagatcatctcatcgcctcgatcgcctcgtcgcactgtgccgctctctgcaagtcgtaggagaaaccttgacaactatccattctccttcccttctggtgaagagcacggcctcgactgtccccttcctttcagctcaaactcctgccgctcgtcccgacgagcctcctttcgtccgtcccaaccgggtctcccaaggtagcccacaacaaaggatcttcctgaagtctcctttccgggagaaccactgtgccgttgtaccccagtttacggtcacattgaaacaggagaaacgacgcctgacctttctaaagacgactttcgaccccgagcacgatcactcacctgtgtgtatgtttgatttgctagtagtagctcggttgcacgacgacgatgacgacacgagcggttgagactagtctggtgaatcgaatgaatgatggtcaagttttgtgattgaccgagtcgtggagttgcgaggtggtcgacctggaacgaggaatgaacgaggtggtggtgcgtgtgggggtatatgatcggtccttcgagaggagctaggtgggtgttggtcctcggttgctgacccaaccagctggcaacggcgatgggagggggaggggaaagggcggatgtccaagtctcctatcgtcggatacgtgccccggaggcatcgtctcgatcgtcagggggactgggcgtatgatcttacccgggtctcggatgacctgccttactcaatgattctggtgagttccgatcatggacctgtcaacggcctttacatgatctcacaacccgcacaaatttcttgatacagactgacatggcattcgtagatgtggctctgctggatgtctacaacgatccaattctggaagcgcagagacggttcgttaagaagctcaccaactgcgaggatattctcttgaatttcgtcgggacgataggtgagatcttgtggtagcgacttcgtacaatccatctctaaggcgctctctactagctttctcccggccgcctctcttagtccgtcctcccggccctgacctctaccatttcgctaccgaagggcagcaggtcggcatctcccggactctcggacacaaggaaaagcgcaactattgcatgcgaaactttagagaggctttcggagatgattcgctgatgctgcattcgatgaccatgtcgcatcaggtcaaaccgaagcggctactggagggtacggtggtcagtccggacgaatacaaatgtgacttttggtcgttgagaaagagatgcgggaccagaggttgaatataaggttgtaaaaggacctggttgtggggttgtatcaactagatccggatccgcatgcgtaccgaaatgtcaccagagaagatcagcttcgggcggtcagaggattgctgccctttccattgtcaactcgggttctatggtgaatgtgactggcaaccgtctcgagtctcatcggaccggttcccgtcgatgcgcgatgcgatgcgcgatttgggcatcaggccattgcgtgccacgcgacacatcgattccctcacgcgaggtggctgttaggaacatctcgcgcctgtggaactttatgtatcgacgacggactttgatgggaccttcttgtcgccgtgttgtgacgcccctgagcgagattataaccgatctcgagtgactacgcgtgtccgcccctgacccgcggtcacacccatccagatccgtcacatagagcgctaggtcgaactgtggtcgaggttatgcctccggtcagagtcactcgctcgctcggccgttcggatacgaaaaaaatggcaacccggtggccacaacaacgtcggaagcaggcagctagtccaccggccccgtcgcgagtcgaacgtcggcaaccaggacctggtcttgtaaatacgattggtcgtcaaactacaatctcgtgtcgcgacaattgcgatcgtcgtttgcagcagcgaaaacatcaacacgatcctccatgcgtctttcgtccaaactgcaacccgcacgaatcaacgtgcaccgaccaaaagtcgtccgcctcgtcctgagtgctatcgcagttttcctggtaacgaggacgatcgtatggctcgcatcaccagcgaaacccaatggatccagtcgaccgggtccgaatggtcttggcttgtcaggaaagacagtcatcagtacgacagagtctcgaataccgttcatcccggatgatcccaataaggatctcgatttcattacccttaccacgctgtaagtccgggccggagcaagccccgagagacgcttatccttaaatctgggcccaacgatttgcaggaataatttgctctatgcgcgaacactaggagccaagtactcgttcaccatcattacggacaacgtgagtttatgcgatttttttgccgtgcggtccccgtgttgacgtcgagtttcgaccccgtagcccgacaagaacgcgccgggtatcgccacacatggaatccctcctgatcagatcgaaaagggtagcttttgtatgcaccccaagtggggtctccgaccggctcagttctgccgtatgcctgtcctctgggacattttgagaaatgatccctcgatcgaatacctcgttcatatgggtcggttcggctcgacccgacgcgagcaaaggcccaaagctaaactcttctggactcgacagactcggatgcgctctttaggtcgacgaattactcggttcagcgccatttcgacgagctgtccgaatcccaacccatcgggttcatgaacaacggtccctggcagcctcacaccccctgcaccggatactatgtcatgaaacagggccgaaacctcgctccggctagtgagcgtggtggcatcttcggctggggcaacaagaagaaacctgctcctcgcacgatcgtgaccgatttcttgaggttgtggtgggaccaagactggcacctcaatttgtgcgacggtgaacttaaagaccagtgcacactttggaacctcttgaactatggcgagtctcgctcagtaaattgctcccatagcagcgatactgatcccgccaatcttacttttgctgcagacctcggcctgaagaaggttcccggcgaagccgccgccttgttccgaaagcgaggagtcgtctgtgagtttgaacgtgtcgcgcgctcaagtcgatcaaaccgtctaacaactggcgatttgtagttttccccgaggaacagttccacctcgtcgcggacgaccagatcatcttgcatcgacaccacaagatcgtcgaccgatacggcgctctgctccgggaatggtcctggaacgactaccccatcaacaccaacccggccgacagagagcgcttgcgacagctcctcacccaggtcgactttaggcgagtcaatgcttcggcgattgcagaggatatgtgggaggtggaaggctaccacacccaatggaggtcgtgatcggttgtaccgctcgggtatggccagagtgtgtagtcttgtacagtgtttttcctttcgccggccggtgcggattttagagatagcatagcatgcatcgtaatgaccgtcgcagacacagattcgacctcagccgtagtcatgcatgtatctaaacaaatcaaacccgtctcgatccggcctgtcggatcaaattgcagtcaggggggagaaatgactccgaaagctttttccacctttcggtctggctgcttgttgggccggttagctggaccttgctggtcggccatataaagcctcgcccgtatcttttagtcaacaacttccattcccctggcatcgaccgcaaagaatatatcgaggataagttttgatgaccaacaaccaaacatgctcggaatcatcatcgaacagctgcgagatatcacgggaatcaaccgaagaggcaccaaatacaggacccctcagcagcaactcctgcgcctggtcctgggttgcttcggtctgttgacctttttgtcctttatccgatggacgcaatcggacaatcgacccgctcgacgttctccccaaatcgaaaagatcagggggatcgtgtcggatacgagagtcgccctggttgactttcacggatggcacgatggtcagtgcggcagcgtaaaccgcccttttcaggccgtctcggctgacacggtcttggtcccgctcagaggttaagggtgccatggttcatatcttgaccgagatgcagctgaacttgaccagacatagtaagtactgtcggttttgatcacgttctcgaatgagctgcttatgatgtggtccaccttcctcagtgaatcagccgatgaggttcggtttcgacgcggtcatgaacgatttcgctggagaatgggagtcggaactcaagggagacatcgtacctcaaatccgtcgaggcgaagtcgatctgatcgtctttacaacttgcaagtcgagcggctgttctgaccagactcgtcgcgtcaatctagactaacgctcgtttcgatggcccttccaggtgatgccaaggacatcaaactggtggttccagcgatgctggagaatcctgctgtccgtgctgcctgccttatccaccacgccgatggtttggccgacattcgagaggtctcgatgccgctggcaatcacggggcagattacctatgtcggtctcagcccgcacgtcacggactttgtccgaagggagctgcagaattgggccaagtttgaccgacaaccgatgtggaacaatgttgatgccgcgaccattattccagtgagggtctttccacggtgattgattgtgatcgccccgctgatcacatacttgcagaccttccccacgcccggctcgaacggctggaccattgagcgaagccagtacaaccgatgggtggtacaaggaaacctagacccgacgagacgaagttatagccagctctttgcggacatgctcgaattcatcgagggtgagttgacaatatcgtgcagctgcaggggacggccattgctgacacaacgccacgcctcgatagaggatccccagagctggggcctagtcaagccgccgggtcaaactcgttatgttcccatcgaaggcgccgacaacagcatctcgctgcacgtcattgggaaaaagatgcccggacaagaaccaatcatcccgcccgagctcgaagggatcattgagatctacgaaaacctcgaattcgtagaattctacaacctcttgcattccatggtaagctggcacggcgactcaagattcagatcaagccctgacgtccaccctgtggcggcttgccttgaacaggacgtcatgctgcccgctttcaagctcgagcattatctagaaactcgagcctccagtaccatggcagctggattgatcgcagccgtgagtcaggccgtggacattgtgaccactttttgaatctgacagactgcatccccatgacgcaggttcctgtgcttgcttctacgcgagagatcgccgcctacagccatctcagtgccccggcggtgctagagttccccaccggcatgagcgagatcgaggcacttaaaatgttccgagctggccaggacccaatggacactctcaagaggaagccgcgaaaagctccccgattgactcacgaagagtactcggaaaaggtcatgggtgaaaacatgcagacgtttgcacagatgctttcgatctggcgtgattaagcgagcggtctacatgaacgaaaataacgacgacgagagtttcagctagatgcgatggatatatctggctccaaggcatatgtacacgaggacgatttgcgttagacattcttgactctttacaaaatatcgctgtccgaggcctgcctgcggaccgtcatccatttcagtctttgaccgatggcacgccatactttgctatttgaatcgtaaagtctctcgtgatattcgtcccaggcaccgacgctttgctcgtgaaacggctcgtcgtccatgtggtcgccaaaatgtcgtccagccttgaccggaacgaaccagtctccccacggatcgcgctctgcccgcaacatgcgaatagcttgtatggaatgcatcccggcaggatgtagcctgatggccgggcggtcaaggaaggtatatgctcgaagatgctgcggggtgaccaagatgggaacctgaagcagatgggtcgatcagctcgacattctcacggtgaccagcggctaagacactcaccttggccatgatcgcagctgtcatagaagaggacgcgcgttcaatcaggtactctggcccggtgaatgcaggaacgagcagatcctagatagttggctcgcgagtcagccgcagtgtcaaggtagttcgagagattccgacttgccattgaagctagaacatcgtaatattcctggtactctaatccgctatgaacttgtatcacgttctctagctctggtggccatgtgacttctccgacgtgttctccaatgaggtgcagcgtgaacggggatatcgagccagcgcgctttgggcggattaattgaccttcggaggtggtctcgtagccccaagcagaaggatcggctgcaagacggatatgagattctgcaaaacagtcgcgtctcgtccccgttctttgcctcaaactcacatttgatcgcccggtgtagctcatcgaagactcgtgcatagtctctccttttgtattcgatccggccctggatagccacacgagacacagccagtttgccattgggaggaacttgcgacgtgatattaatggtattgatggggaataccttatttcagtgcaaactagaatgagactccgatctgaccaccgcgcaaccaatactatgcgaacgcaccggcacgaaagtttgggtcaacaccttgtcccaccccatctcattgtcctcgagcgaccaattggcgatagtagcagtggccatgtcggttgtatgtgacgagagtccgagcatactcagtcgaccctctgcagcaatctcggggagcgtgtatctttcgatggccatcacctgagtgtgatgcatgacgagaacgatggcggtattcttggcggccaccatggcctttcttgtctcatcgtgaacccaatacttgtcgccagaggtgatgaccaggacgtcaaagtcgttgttggccaaacacccgcttagccgatcggggctgagcatttcgccaatgctatgggtgtcgaagatttctccaaacgagaaccgataagggggtcctatcaaggtgagtcgcagctacgtcagtcatgatgcaggttgaaatataacgaatcgttgcgcttacggaacaaggtgatgttggcatcgaggttgcggaacgaattgatgaccgcaccccagacctctgccggtcggcacgatgatattgagctcgctggcggctcgcaactgatacctctaccggtactcaccctcgtgataaggcgcaaactcggctattgcgacccttgagcccttccacacggtcgggattggttctctagagaccaatggatggactctcgagaccggcaagcttcgctctgccacgacatggtcctgatcttggacaggcgccgtatgacgaaccagctgataacacactagcagtccgacgatcaagcacaggagccgtgccagattcctcttgactcgtttgtgaatcgccatcccatgtcccagaaggggtcgtcccgaggtatcggctgtggtcgaggcttgacttgctaaagcaatgacgaataatttatgggatcaggatcctacacttgccgaggtgactgtagaccgaatcgcaactcgatcgaccatacgccaacaaactttgcgaccgcaacgggccgaggctgagcaggccgggtactcttgcgggcactgtgatgcgggcttgattctgtctgtctgcgtgtctgcggtctggccgttctgatctagcaagacgcgcttttttggatttggatctacgcggataggtaccatcacatacgtccatccacgcgccctcggtcggttttcgtgtaaccgagagcggcgaacggcggggcaacgtggaaaggcagcaacgacggtgaaggatcgggaggaaatcagactccgaaccaagcaagggggacagacacaaatcgggggcaggggaagggggcgcgtccgaaagattcagctcatccggtcggatcctctcggactctctgcgtgctgcagacgaaagcggcacgttgagctttaggtagagcaaaagttctcctcgaaccttggggtgaccgtcagagacgtcgcttgcttggctcgactctataagcagctccgggacgtcaacgatcggtctcatgctgccgaccacatcctcatcaccgttgccatccaccctcgagcccatcatgcggacgtcacctcgccaacgacaaaagctcatgcgttatctctggttcggcctcatcggagcactctgtctcttgtggcactacaatgagcgtgcgagtgctggcgtaagacgagtcgtcagaccgttcatcgaggaggagggtgctcagcttccccacatgggatattgcgggatcgatgacattgctttgggcacatgggaggtggagaggcagtttgacgatgtcgagagtatcaaggaggcttacaaacttcaggcaagtccaggctacagcatatcatgggcatgatctgggctgaatgtgcgggtatgatcgagcgatacagtcaagcgccgacatgacgtgccatgcgatcccggaaaaggaaggcgagctctctggcttgaccgaggaagagcaaaggttcaagcggatccaggctgctgcgacaccttcgctccgaccacgaggaggttgttccatccacgaggctgagcctgccatgatgctcaagcggctcttgaggagtccttcgggcatgacgtgagtaggatcagtccgtgctcatggtctgtcagtttccaggctgaatggagctttattgacttgcaccaattatcagcattgttgggggtgagtcctctcgccgcacgaatcgtgggagcagctactgaacccatacctctgctaccagattccatttcccaatactcatttgcggtacttctcgactcgcttcactccgtctccaagggtcttctcaggaagaacaaatttagcgattatcactacaccttgactgtcaacgagaaacacgccgacgtcgagcaactcgtggcaactgcgggcattacgcgggcccggcttcagtacccggtggtctccttttatcgctcggaccacctcgtcactcctgcccagctaccagaggtgatgggcgaggagacatgggacaggctgaagctcaaggtgcaaaacgatgctcccgattggttcccactttggtcgaagcttctcgaagaagcacacagcatgctgccggcaagcgaaagtatggctcacgacgagcctgacctgctcgtggtcaactcgggagcgcattggaacgtcggtaccatgggatactgcgaggaagaagaatttgtcagcggttaccgaaagatggtcagtctcgggtagtgccttatcgaggcgggaacgaagtcagcctgatagcccccgcgattggtgcgacagttcacggacttgtccaagaccatcacccaattaccgtacccggtggcagcttactggcggtctctcgcccccgctcatgtagattgtcaggtgttggatacttgtgagttacccaggtcgatgtcgtttgtgagacttgaatctgatattctcctaatctgcatcggactagtcaacaatgcgcgactggactggtcttccccgatcaacggtcacatgaaccaatggaactagtaagtgtctccatcgcgttgtatcgcatgcgcaagacgagctggcttaactcttcctctctcgttcgaatcagccaatggtacacctggatgaacgtcattgctagacgacatacgaccaaagcaagatcgagtaaagattgggacatgcctagtattaccgctggcaaggctgccaatccggttcttcgttacatgaacgtctgggacatgtcgatgaagcgccctgaggcgcatctcaagcctcccaaggattgtctccattggtgtatggtcggggtcatgaactactggcaagaggcgagtccaaatgggtctagctattcaatggcgagatatcgaactgatcaatctgcatatcccactcgacagctgctctggaacatgatcgtagaagaatcgaaaaacgacgattacgacgttacgcctctgatgccgtcgaagcgacgataggcttgatcttactttagatggcttgccggatgtatactgtagtctcgaagttttttggtcccagttgattcctgtaacgacgttgccgacgcttatcgcgtctaggttctgacagccggaggtgtacaggccttattttaagtttctcttccgaaaccttgatcacgtgattgatgccgctcgtctcgatcaggaacagcacaacgcgtgattgatggcttgccgaagcgaaaataccctttcacgttgaaagatctcggcctcgcgtccgaattcacgcatgcagcgttcttggtacatctcgagtctggtagacggtagagtggtagatcggttgtcagacttgcggcagtcaccctcgcaacaagacactgataaaccgcggctacttgacagctaccgcccgtgctagtgaccgggtatggatcgaagtcgacaggctccgcgaaatgcagcgagtcgtcgtccgtctccagcggtgtggtcaacgaatacatggttcaagctagtcctcggcttcttggctctggtctacgtgctgtctcagtctcagcagttggcatcggtccgacacatctttgatgattccgaacgtctccatggctttgactcgctcgacgacccaacgtatcacccgaaaatctcgatcattgtcgtctggaccgggaaggagcaacccaactatctcacatggtttctagacagtatcgctcgtcaacctgacgaagtcgagttgatccttattcaacggggcaacaaccagttatcaaacctcgctgcgaacatccctcatggttcccgtaacgtcaagctggttcaaatgtcggatgagcgatgtgagtgcaagcggtgacgaacaggtaaggagtaagatctgaaatctgaccgacggctcgccgacagactggcaactacatagcaactacctgtgtacgcgctggggaggatgttccgaaggagatcggcgtcggatagcctatcatctccgcgacatgggtcgtctcgatccggtaagagttgagcgtgaccggtgtgaagccgaccgtgacctgagcggatcaactttaccagcaaagttactcgttgtcgatcctgcgaggccaagtatttgcgccttacatccaccctactgctgaatggtgggcatggtcagacgttgacacggtcatcggaaggtgagtgcaggcgttgtatacgtcaatgagatcgtcgattgatccacttgcatttctcagcctcaaacgcaaatgtgagtgggcaatgctgctctgcaaagcgactacgttggatctgactctgccattttgttcatggctcatcagttccttgggatatcgcggaccgctacgatgtcattctgcccacacatcgcaacacggacaaggaacgcctcgtctttatgcggtaagtcggctgaccccaggccatccttgatgcttgtctgacgtctctgcgaactctgtacagtggacatttggctttctttcggaacactcgtgcggcattggctaagatcatggcccatcccgactttgatacgaaagagatttggctcgctaatcatgactttcacgacaagcaaggtaagtcccagcttattcctggtctcagctcaacatgacgctcaactctagctcgttctctaggctgccgcaagcacaagacaatcggctgttcgccaaaggaggctgggtactcgagctacatcctcaataacccttcgatcaacttcttgacactcgacgcactcgcccagaaacaccatctacttttctcgagccatggtacttatacaatctcaggcggtcttgacgaccccaagagggctaggatgatcgccaatcgaattcgagcggataaacggctttctacctcggctaaaccggcaacgttttccgatgaagccatcatacatcctgtcgaccttattcagggcaacttttcatccacgctgtggttccacgatcgacattcgacacactacattccccggtttggcgatggcgacccgactttcaggaacgatcaatacctgacctacctccacaggctgaacggccacgtcgaggaacgtctggagccgatagcccggacagaagaccacccagacgtgatcgaagaatggatgtatcttcattatcaagaagagaaaaagaaaggtcagttcatcgttcaagccaatccggcctccttggaccgcatcgattaacaaaagaagtcatcttttttggcgcctagactggttcaagaagataccacaccggtcaaagggtacaagcgattgggtcatgctaacggaagggcatgatgctggcggcttcatcgatttggcggagcacgatgccttgtagcttgatgatagacacgcctctcggcaattacgacggatcccttgacacctcatcagattccagtcaaaccaagtcgggccgatcatctataccgttgaccggtttcgacgactttcgtcagccctgatacgaaagcgagcgtctcaagactgatccaaagacttgtttccggcaaccaagatcgctctgagcaattaaaactaagcggactatccgatgttgcaaaccccagctgatcctcgcgcggcgctcactagcatcggattgatctgcgttccgtgtgctgtgagcagggggcttgaccccttggccgtggcatcaattcgcgtggccaaaagtaagggtttcaaatttttagggtttgaaactgtcaaacgcaaaattccatgcttgttaaaccccgttccttcgagatctcagtcctggatgacggcggatgctaccgaacgattggaagggggcgcgagctaaggagcggaacgtctcaaagacgctgatagcctctaactgcaagatgcgtcttgacgctcgcccgcaactagatcttgcaaagacctactccccgtgtcatcaagaggggtatcggacgtcgcccctgacaatcaaggaacgtggggccagtcttctgcagtcaaaagttctgcgacacagcgttctttgcatcccctttgtgtgaaccccgagaccaaactagcacaaagggtctgtcgtgggaaagtacggattgtaagacgtgactgataagcatatatacgcgcgattgcaggcgttcttccactaagaaaagtaggaaatgaccaacttcacacataaaactgtccataatgaagttgtctctagtcgaatcgacccttgcgatcctcttggtcatctcgaccgtgtctgggcaggccccgttggatcaaccatgcgatggagccagcaccaccaagagtggcgatggcttctggtctttctacgaaacgtcaactttacttgaccaaatggtgagcagaagccagaggcgaggatgggaaatctcaacggttgaccatgattctttttttcagctgggagcagatgacaaatacgtgccacagccgtcgaatgtgggggcagaaaacattctgaaatgtgcagacaagtgtcacagcgacgccggtgagttgttctcgactgcacattaagccaggtcaaactctgaaaggacttggtatgcgtagattgcaacgatttcctctttgaaaaaattgacgatcacagtggagattgctggttgatgaagaaagggactttgaatttcccttacaccggcccgaaggacgagccattcaaagggatcggcgggcgcggaaactgtgaggatgcgtatccccaaaagtggctgcaaggcactccggacggtgagtacagtcacctcgaacggctccgtgcggaggctggctcgatgctcagacccctcgtttcgatagagccttcaaagttcaaatgctgcaacatctggtattgagcgcttgtgaccgtgcgatggcctggctcgcacacctttcactggcggtggcgatcagacatatgaaatcgatgtgaaacagtcaggatcagagacgtctagtcctgcactgattatctggagttactgatcgattattcttcgagagattgagctaatcagactcctcaagtatctgccaaggacaatttcgttcccgatcacaaacaccctcgctcccgtcgataacgttggactttgaatgacttggaagcatattacaatccgacgtcccacaatcgccttgacaaacttgacctgacacatctcagccctctttgagatttcgctcggagacttgtaaccagagatcctgtttggtgaaacaagtcaggggcgcgatcgagctcgtaccacaacgaggagcactgaccttggtctcgaggaaccatgaattcgagcagaaccagggggccaatcctccatcagactcttgtctctttccatcccgatgtcgcggaggatgcatgtggggcgaacctggctccctccgaatacgggcgaaactgaactcgtgaagcaattcaggcacaagtttgctcaattccatgagggaaatgttcttgccctaagtcaaaagcgtatcagcatgtaccgtcagatcacgacgtcactttggggccacgcttacgatgcacgatgtggttgacccgccgaatgtaaagtagaatcgttccaaccttcgtctggcctctccaccatcgccaccctctttctcggccttgtccgcgtcgatccagcgctccggtcggaacagtttagcgtcctcgccatacgcttcctcttgcctgtgaacgatataaggcgaaacgcccacgctcgtcccgcccggtacaaatctgccgcatagaagcatgccttcggcaggtataatccgaggaagttccatcgcgatgggcgggtgtactctcaacgactctttgatgcaggcttgcagataagggagttgcgcggctttcgagtagggaactggcgtagaaagcgttccatcggtgaatgcgtcatcgatctgtatgtaggcaatcgtttcagatcgaagcctgaaaatccctgaaccgacacaacgaacctctttctgaagcttggcatagacctcgggatgcccggtcaaggatgcaaacagcgcagccgtagccacggccgtggtatccgagccagccgctacgaccgaagtggcggtgaacaagacgtctgtctgcgagtaggtctctccgttgggatgtttggcgttcataaacttgttcaacatctgaatcgtaccgcatccgcatgcttagtagtgatctcttattcggccttccagatctagggcgcgcggctcacatctttcctagcctcttccccgctgagcacggcgttatacctcgctgccactctcgacctggtagcatcgacaatgacatcgcttcccggttggctggtatagcgtttccacaagttgagcgcccgtcgacccaaccacggcggaagggtcccagccacgcctccccagtgagagaggttggctactccgcgcaaaaatcggtccgattgtatcgtctgctgcggcgaatgaaacgagtagggcgacaagagatcgaaaccttttccgaactatggtggcttttcatgatcgaatgggattcaaacggggcgacgaaatgtaccactcacggctaattcaccgacggcgtccatggcaaagtaatgagccatcttgtcgaattccattggagcgcttccttttcttccttcgaggatctccctcatcctctctctgagcgacaaaatgacgccctcgacgcactcttccagattggtcaaaaaggtcatggcgtacgccggagcgatggctttcttcctgttacgatgcgaatcgacatccgtgtcgctgaataacgacggcttgccagggaccgcctgaaacgaatggtagaattgggtcttgtgcaacggattcgcgatacggtagatggatgccagggcgtttggatccgagacggaaagatggttggtcgacaccctgacgatgggtccatacgttttgtgcagttgctcgagatcccatacccaggtcatatcactcgcacgctttgtcttgaatagcggaatcccaactcggacggtccatggtcctgggatcggtgctaggggggaaaggaacaggctgtaggctatccatagtgggaccgccagtacggccgcgaccagcaggttggccgtcgtgcagtacggttgaagcgtcgagatgatgacggattcgaccatggcgttggtttgcgctctatgtttcggatgccagcaggtatcacagatctccctcgttggagcgtggactttgtccaacagggaatggcccccagactgagataccaaaggtcatgggatgaatatatgaatgtagagagacgtcatgcggcggcgttggagacccaatgttccccgctttttagcgcgccacaatgtgctcggcaggttaattcgacttgatcggctcgggtccaccaagtccggtttgccggaaaatgtcgcaaaacgtaattcccacgtattcaatcgtccggacatcggccggactgggtcagatcccaggacaagtggacgggacggacgtgcatcacctgaatcgtggacagaatctttacaagcctaggatacaatcattccctaacaacaggcgagatgctctcgctcagtacacatatcggaagctgaaagaacgggttccaggatcagtacccgcacgacgcgtcgacgtcccccctgacgactcacttgagattctccttgtcggtcaagtcgctaaacgccgtgtcgacttcacgctgcaacgtctgcccgttggcgatcatctcggccacgaccttttccttcttcttgttctcccagatgaaaacatatctaaaggctacgaacagggccagctcgaggcaattggctaccaacagggatccgatcccgagctgatatttgggtgcctgggaggtgaggtagaaaaagggggagatgatgttcccgatcgacgcgcccgcccagatggcgcccgagacgatcatcttcttactttgcccggcggtgttcgaggtgatcaaggacaaggcgaggacaaaggaagactggtacgacccggtcaggtagaaacagatcaggcgtccgacataggcgtccttgggcgcgagcaggaaccctagcgctcccgcgatagtaggcagcatgaacagcatgcagaccaacgtactaggatcacggctcgcatcagctggagacctgatcggcgacggagtactctgcgacaacccaccgactgttattcccgatcttgctgttcaagaaggctccaagcaagatccagatgcaaacgagcgctccttgcgggatacccaggagcgcggtatggaaggtgtcgaacccgaggcccttgatgacgagggtcgagaactacagttccagggagaagccattagattcacgtcacgggatcgacacgggatcgaccaaggtgcgactcacgttactgattcctccattggggatatttccgaccagtccgagggcaaagaacatccactagaagggacacgtcagatttagtcttttccatctaatgacctgcagcacgacgctcacggtcttgtagtccaacacggcctcgcgaacctgtccccacctgatcctcttgctctcgattcccgtctgattacgcctcattctcgccaacatcatcaacttttcctccttgttgaaccacctcgacgtcaatggcgagttggcgagagtgagtgcgataaccactccccagagggcacagacggctccgacgatgaggaactcgagtctccaagaggcgagggatcctttgatgtgaccgataccgtatccgatgaggccgcctatagcacagaaggatcagcatgcgatcaaatcgaagtcgaggtctctcacgctcacctccagcaacaccgattccattgaagagataccaggcagaaatccgcgatggctgttccgcacgcgtgtagtacatgctggtgaagagcatgaaactagaagaggcatcgttataagccagggaatccaggtttgagagcgatcgggtgaactcacgctgggtccgcgatcgcttcaaacctaaatgtcacggaaaccgtcagtcaggattgaatattggacgacactggagaaggcgatcgtcactcacgctccactcaaagtacgaagcgctgcaagggtcgcaaagttttttgccgctgcttggcagcacaaaaggacccctgcattaaactgttggtcagcatggttctatgcatccaccctgtcgtcggttcaggctcaccccacatgaaaatattgaacgcaaggtaataagctggcgggcttcgctgcatgatcaagttgctagggatggcccagaacacccatccaaagtagaaaatgctatcaagtcgggacgatacataagtggacagcctgccgacgtgccgaggccgcttgcaacgactcacgatgagagccacgaatactcggttggagccaggttgagatcgcctttgataccataaatggcggcgtagctatgcaataccgggctctgttcaatcacccatagttctcgagtccagacacgaatgactcacgacaaggtggtcttgtcgacgtactaaagtccaaggtcgaacccgtcagtctcatgtaaccgtaacagtggcgcaagcgcgacctacatagaagaaataacagatgcccaagattggaatcacgcatcgatcgatttttctgcgggagggacgaagcgatgacatgaatgatcttgctcgtacctgtttctattcatacgggcctcgaccttacctgagcaactttttttcgaccgccgggtcgagctcgcccgattccccgtatcgttccaatgcttcatcgtacaactctccgtgctcttgctgatgctttgtcgctgtatgcttggttggaagctcgttttcgggatcatctacatgctccacttcgggcttaacatcgatacggtcgtcttgtttggtagtcatcttgtggtcaactctcgataggatggctgtgggggtcgtcaacgctcgcttggaagatggggcggaagatctggggcaccgaccagatgtagttaggcgcccatgtacttatcctgcgcaacctgaggttccccggcccggtccggacccggttgaaacgatggcagctccaggctgacagtcatccgacctcgatttggagtcggcgatatgatagtactcaggcgctaacggtctaaatttagagaacagctctcaacgccgaggggagctgttcaagtatggacactcagaggccaattagacgtccgtgcgggattggtaaaagtgtcgattggcaggtcgccgaggagtatggtctacgaccactcaggtggatctccagatacgtactgaggacagagtcgtgcactggccagctcagtaggttcgcactcctgacgtgagcggcaatgaaagccgaggttggccacaatcctgagcatcccccccccccccatttccgcctttgcctcgagtacattttcgcagaccgtcgagtcacctcgatctcactagtctggtaggtatcccctcatcgatagcagatcccttggttactccctccaatctcctctgacgagattggccgttcgttctcgtacgcgctaaagtccgggcagccggtccgaggacacgttgaaacggatttccaaaaccatctcgcagaatctggcaagagactcgcaccgatggccagccgttgattaccggctgaaaccgagaacgcccggagatcaccatgagccagctcgtagtcaggagcctttgcaggaggcttgacgatgctgctattcaccaacagcagtgtagacgtcaccaatccgacgacgcggccacgatgtgatcaccttgcatacaaatacaaccggccttcgagtgcatggaaatgacgactcgtacctatacaacgacgtgcaaggaagcgcgcgtgtgacagacctctctatgtgtctatgtgtttcgacatttattggcgcgggcacgaagcaaaaggctagtaggcagaaacggcaggcatgtcccgtgtatgtgaaacgtctacgacttgttctcgtcgtcttgcaagtagctgtgatcgagactggccatccatattcgagtcttgtggattctatgtggccccgagcgacaatccaaaggtaagcctggggatcctcttcggcacgaagcgacaatgagggacacgcacctaaacagttcacgaacgagttccctgaaatcgatacgtttctcggcgataaagtaaaaggtgagtttgcgtcgatccctatgagctcgtcgcgcggtcagtttgtgcatttccatctcacgcactctgacgcctgggactcaccactgatactcggcgtcgaggacttccatgggaagtctcttctgcttgaccctctgctgacataatgccaacgcctgcgcctcgtcctgcaatttggccgtgagcagctgtcgatcggcgggtccggccttgccaaagatgcgcttgggcatgagttcgcgctggacggccttgacggcggggttcgggttgggtccgttgactccggcctcgacgttggcttcgccgacgaggatgttggtgagcgcgcccttgatccgggccgacatggcgccgtggacgtgcacgtccatctcttgtttgcgggcgaggttgaacgacctgacgtcgtcgacggtaatcttgtcctccttgaccttgccgagatcttgtccgcggtcggcctcgacaatgacgagatcgccgagctgcaacgtgacggtagggtccggtgtgtaaaagagatcggtccgtcccgccttgaattcgacgatgaagagacgtgtggcgggattgagcatttggacgggaactcccttgcccatgtcgttcatggcctgattggtgatcggtgcaggacccgagccgatcgacccgacaaacgagggcgcttggcccggtgcaaaaggggacattttcgctggttgggcgtagagttggtgggggtgttgttgttgcggctgttgttgttgttgatggtattgctgcaactgctgttgttgaggtcgaccaccgctatagtcatttgggcgtccctgctggaaattttggtagggcccggcgttgccctgtccgccaaagtggccgttgctgataccgccgttgatcctgggtggggcgaatgatccataaccaccggcatgattgctcgcaaaaggttgacccatttgaccgacggcgttgacgttgcgtggtacaaaggtcgctccgtacccgggcacgaacggcgaggcaccgacttgccagtcccggttgttgttgtcgttcggcacggcggcgccatcgaatctcgacctggcctcgtccctcatcgaagcgctcgaagaatcccgggtcgccgttccggccgacgactgacggaacgcaccctgacccggttcgtggtggagggataaaccgttgccgagatccgccgccaacaggtcggcgtccgagaaccctgtctgtctacccctcgtcccgaccgaggtcgacgtgtgggcgaacgatcgaccttgcatttgaccgtgaacgttgtgctcgattccatgcaggggaaacttggtctcgatctctggactgacgagagcttctgagaacccgaaccctgggatctggaaccctcgtcgagcgctaggtccgcctgcaaccgagatgctatgtctcctcgaactgcttcccgattgacctccgttgcccagtccgcccccgggaccggcaatggcgtaacggtcgtgcgtcgtcgccgtcttggtggtggtctgcgccgcatacggatcgaacccggccaacgccgcgtggacgctcgaggtcaacgtctcgtgcgtgggatcgttgtacttttccgccgaacccgagtaagtatcctgaccgtgaacgaatcggcgtccttcacccgggatgccgagctttgaatccgtggcgcccccggtcgtgagggtcgacgttgtcgtgtaacccccatgcctggcgccaaagggggacatgttgctcggatccctgaacgacgaggacgacgtcgtggccgattcgtctggtaataacgacctcatccgttgatccgcccagggcgagtttgaatcgacgctttcccccatgccgaaccccctcgatgcgccgccgcccatagctgtcgccgtcgtcgtcatgccgttccccatcccactcggtgcgtcgatccccgtcaagccgtgcaagacgcctccgccgaacaacccgttcccgaacccggctccaccgtgatgatggtgatgatgcgcggagaactgcggtctcaagacgccgggggccatcgactggctcctactcctcgagacgttggcttccgcacgtggtggcgagtggggtcgagtgtggtgctggtcggcatgctcgtgttcgtggtcgaggtcgtgatggtggtcgttgtagctgacattacggtgcgcaccgacggccgaatctctcctatcggcgccgccgccgatccctaccaacaacctggcctggggtagcgggggcgagcctggtggggaggacgtatccgaaaaggtgggaaagggggacgagctggatttgtacttgtccaaccacgattcctcgacgtgagatggcatctcatcgacgagctggcagcacgaaggtacagtgtgagatcgagatcgagtcgatgttcagtcgactatatgcggcgatgacgacgagacacccgcaagactcaccctgggggacctcgtctctcttcccgagaaactactactcctggtgaccgtccctcccggtcccagccccagacccatcccaaaagtcccctgaggcggggctccccatccacccgtactccctctcgccagggtattcctcaacccacttcctccccacctgacgccctggcctgtcgtcgaccctgatcctgcggggatccctgcgcccgtagttgcggctgcattgataccggtcgagtgcccggtcggggatccgccgatcacgccgaacctggccccgctggccgtcgacgagaccgagtctgggctattaccctgttctctgggtacggacgacgaggtcgatgtacctggcatgatcccgccggtgttgacgttgttgccggacgtcgagatggcgatggtataaggttgagatcctctccgggtggattggaagaacggggattgggctgccgaggaggacattgtgcgaatgggataagggcgggatgcgtctgggtgatgtaattggaagagcgggttgttggatgtcgaccccgaggtcgagttccccgggatagtagcggtcgtcgttgccgtctgtggtggtggtggtggttgtggttggtgaggtcgagtggatggggacgaggaggacgggtgacgaggttgtccaccgtggctcggagccggagcgttgatcgaggactgttccatccgaggtcgaggggagaaccgggtgggggtcaactttcagacgtcgacttcggtgattagacgagtgcaagtaagcatgtcgttgtaggtatcagatgtagtcatatagtcgttggttgtcggggttcatcatcaggtgcatgcaggttgcaggttgtcgatcgacagcgaccactttgggaggagagcggaagcaaaaaagggagaggagcaggtcgttgcagttgggcacatgaccatccatccccatcaaccaatcaacccagcaacacccgatcatattgaaccaccatcaccacaacgacaacgaccacggcagatagtgatcgtcataaatcgcatgtcaatgcgagcgccttcgccgagtcgcttcacccctgtcgtcgtcgtcgtcgtcgtcgtcgtcgtcgtcgagctcgatattcccgaaatgaaattcccggtcgcggtcgaggtgatcggatccgacgacgcacaaacaagaaagcggggtcgacgttggggggttttccatgtttccacctgaaacgcagtgtctagcatactcacaccatgttccacctacttgtcactcgtatctcttggtcgactaggtgctaagtgagcatagaacatctcgcccgtgctccgagtgatcgtacaaatcgaatcgacgacgatggcagctgccatcgaggtattttgatgctacatgatggaatgaccgcgtcaatctgcgccgaccgttcgaccacgattcgacgacgaggacgaccatcaaaacgactcgttcgatgcgtctttcactggctgatcttatgtaaagatcgtcccgttgacatgatcatctcctttcgacacccggtaacctgataactagccgttctctatcatcactttaacccgtccctacaactaactggatgtgtggtgtacatgggtttgtctctttatttccacccttcttgttctcgaccggcaaccttaaccccaccacaacccccccccccgacatcatcatcatcaacaacctctacgacgaacccccattcaaactaagctacccaacttgatcagcacgtcgggttcgagtgcgagggaacttggggggaggactgaccttgagtttaagatccatcttcatgacctgttccccagtccccgtggcccagccagcccgacctcccaaagaaggtccacctccatgcaaactcgtcccccccgatcccatctgcccgctcattccactgaccgtgcgtgccttgttgagcccaaacgtcgccgccctcggactcgagttccccgtccctgaaacggatccgggcgacctcgctgcagaacgtacgtccgagaggttgggcgtagtagccccaggtccgaggagggtcccgagcttggtatacagctgacggatgacttcacacagcgagatgacggtctgaaagtaatccggtgcgaatggctgcgagggcccaggtggggaggggatgatcagcggattcgccaattgcatgacactcgaggtcggtgccagggcagactcaccaggttggcaaagaccagcgacgtctcgcccgtatcctgtaccgccccgaaatcactcgcggaccctgtcctccgattgaccttttggcccctaaagaggtttttctgctcagacccgcatttcgatgtggtaactcgtcagcctcgtgcatggcgagtgactgttggatcgaggacccgcgggaatcgagactgaccatccccttgcctccgcctccctctgcccatgcttcccactcgtccaagatcttgttggccgtcctcaacaggtcgatggccgggcttatatcgaacaagggggaaagggataatccgaggatgaatagctgtttacatctgcgaaagcccacaccgagattagagacgttcgacgtcgagtgcgaactcgaagacagggagaggatgactcgcctttgttgtgatttgagttgaccgagcgtggactcgaggtgagactcgatgtcggctctcgtcacttggatcgtgtggaaccagagttcgttaccatcatgggctcttcttaggtaccaccatgaggccatccgtttatcctattcaacccacacgccccaaggaaggatcgtcagctccacattgtggacgacaccaacccgatcccgaatcaactgactaccaacgccgccaagctctccggacccgagatgatgatcccctgaccagcattcccccccgatccgctggcggaatctcttttcccacgaacactcccggcttccttgttcggtgagggcgcgggatcgtagagcgagtgcgtatcggacgagtctgtcgggaagggcgatgggaggggaggttcccggtagctcgtcggtggggttccgcgggaaaaggtacctaggaattgggtttgctggtcgacccggttcggttcgaatcagtcgattgtacggattgcggcagctgttaccaccacactcaccgatgacgtctgcgatgaacgggagagacagcgatatgagtggatgatcgttgttatttatcagtttggtcccatcgagaggtcggtcgaatccgatctgccggggctttacctttcgccgtacgatgggtcttgtcgtcatcgtgatattatcatgtcgtgtgtgctcgattcaagcagcaagtggtttgactctgtgtgtgtgtttgatgctacgagtggatggtatagtagatgacaacagtagtgtgtccatccatccatactaaactgttgttcccctccaagtcgtcattctcggtgcggttaacttgaagtctcggctcaaaacaacgtcgatcacccaaaagtaactttgtatagaagagtagtcatgtagttgtcgtctagactaccttgattgacactacctagctacagcatcgactttcatacgtatcaagatggtagagatatcaaatatgaaggtggtcggtaagtcagcccccacaaaccctcaccatcatccagctcgacaattgactgaaatcgaacatgccattccaagaactcaaggaagagttgaccaagcgaggtctacctaccaacggtttgaaagccgatgtgagatccatttgggaatcatggttctctgactcgtccggatcgtacgctaatgtctatccttcaataccatcgtagctggcgggaagactcaccgaagccgtagctcaagatggtccgaccgctgaaccctcgcccgcacccctaacctcgccctctcccagacccgaggacgaaggaccctcatccaaccccacctctgatcctatgggtgacccactcgactctgccaaaggagacccgcgtgaacagacacctcctcccgtggtagaggctgccaaggaggacgactcgatccctgtggacgacgaggagatcaaggaacaggtccttggggatactgatggggatctcggggaagcgatggggcaggccgccgaacaagggaaagaggagaggaaagccgaggaggagggggccgggagtcagacgggcgagagttcaggtgtggtggggaacacggatgagggaggcgtcgagcaggatcaggcagagatcgtaaataccggggaagccgaggctgaggctggggataagcggaaacgggaggatggagatttgagcatggacgtcgatgcggccgcgaaaaaggcacgtacgggggaaggggagatgcagatggacgtccggacggaagacggtgagccggcacaggcaacccgacggtcctttattgcttgctgatcccgtacgagtctgcttgtgtggccttgattacagacaccccgagcgcaccatctcgagatccgacggaggacgttcccaatcctctcccgcacgcacgacatccacccaccaaagcgctctacatcgacaactttcgaagaccactcgacgttcccgctctcaaagaactgctggaagaccagggcgagttggatagtaccgaggtctctagcggagtatgggtcagtggggtcaagagtcatgtttatgtaatggtgagtcgaccttgtcccccctcgtcactatcccgcccaggtgcgtttgcggtcacttacctgtgtactttcgtctcgacgtgtgtgggtagtacaagacgttggaatccgctacaaaggccggattggcattgcacgacctcgagttccaaccgatcgccaagacgcggttacacgtcgagtttgtcccctcgaccttggtaaagagcctgatcgagcaggaggaagacgcatggaaggcaggcaggaaacagatgaccctggtcatccagaccgtacccgccggtgagggccatgaagggtcgagcagaaaggtctcggtcgtccctgtaaaccagggagcgaacgtaccggggaggcgggtatccgggttggccaatgcgccaccaccacctacaccgttcagagctagaccgggcgtcgcggggatcggaggcgcgcccgtcgtccagcctcgagtttcgggacccgtgagcgccgttccatcgaggtatgaccttgtgcagggaaaggtcaagggcaacagttgggaaccaccagcaagggccaagcagggtccgcccatcagaccggaaagggagaccagagggttcttgaagacgagagcgcggccggtattgttctaccgggaagctcctcgcaaataacgacgcgacggacgtcctgacgtttcacgacccgtggagctagactgttcaaactgaatatgtatacaagtgtatcctgatcgtaacgaagagcagaagcaagctcaaaagcatgtcaaccgaatcatacaaattgtgctagcgcagatcaagcaccgagtcccatctttttgccctttttcttcttggacttggttttggatttggtcgtctgtcctgttgctgcttgggctgtcgaccctgcagtggcgagctcgctagcatccacttgcaccggctcaaactcggcctcctcgtcgaccttgctccgcttcggttcgacatatggctcttcgacatcaacgtgccttgggcgcttcctccctctaccagtctcgattggctggtactcggggacttctctgatgaaacaggaaacgaagaaaccattcgtccggtcctctccaggtacgcagcagatgacagcgtccgcaatgtctgagtagtcgggggtgtggcgtgtcagcgccagaggtcccgttcggcgaaacacattgtgcatgcgactcacctttgtcgcctcccgtcgcctctgaccgtcctcttcgttcccaagccggcaagacctgactacgaggagcaatcttccatccaaagtctcgggcctcggggctttctaaagctttcatcacgacctcttcgtcttcctcggtgtggatcgagcaggtagagtacacgatccgtttggcattgggaactgcaagtaagcgacgaccgtgattagcatggacaatctgaggtggcagaaacgttgcgctcacatttcatggcgtgacggatcatgaccagttggaacgccgccagtttttccaatcgttccgccttgacatcgtcatcctcgggttcggctgtgtgtcggatgaatcagcttgaccctatagcaccccttctagcacgtccgacccacccccttcgaggagatagtccagtcgattaacgatcccggatccggaacaactcggatcaagcaggctacagtggagacttgacgggatcagctgacatcggactctccctgaaactgcgttactcacatcctggtaacattttcgtgatctttgggtttgctctccatgaaatccgctctctgcgccttgacgttcacacaccctgctcgttcgagcatcttttccaacgtcttgaaccgagcgtgtgatcgctcgaacgcgtgcacttgaccctgattgtgcatcaaggccgagatgtaggtagtcttgttacccggagcggcgctggtgagcgttcatcgtatcagctgctgcatgcatggaagtgacaatgcgaccatgagaccacccgactcacgttccatcgatcacgtccccctcgtcgtcttcccagtcttgcatcaaaaccttggccgggaaacaactcgccttgtcctgcaagatgatccctccgttggcgtaatccgcgttcttgtcaaacttggtcgtcgagggaagcgcaaagaggtcggacgagaggtgcgggtcccggaaaaaggaacggggtgggaccgggtaagtcggggcaggaaggaaagtccagggtgggctagcggtgatcatgttctggatgaacttggaggtagagaggatgttggtattgcaccggacataacgagggatttgagctgcagatttcagcaagaagctgattagctcgagctgaactttaagagctcggccgatcttcaagactgactagcgacatcaccacccgacctctccaactcctctttgctactcaatcctcgtttgatttgcagcttgaccagttcggccttcagccgagtcctatgccgcatgatcgcagccttgggtggccatttatcactagcctgaactttgccctccttggagaagagcaagtcttgcaagaggacgagcacgaggttcttggatgtaggtgctcccgagggaactttgttgggaaagacctttttctcaatgttcagcaagtcgacagaggagaggaggccgaggatggtcggtttgtctgtctagcgagaggtcgatgtcatgatttaggaacgctctctggcagcgcttccgatctcaacgcacacttcaagctctcgatgaccactgatagagagtaacaccgaacgatcagtctttctgctcgttcatgccgactacccgactcacaagccaacacccgtttgctctcgtttccctgagcaactcctgcggcagcgacggatcccttgacggagccttgcttcgtgtccaggtgatccaaggccagagcggcctgcttgtagaaattcatggtctcacagcctgttccttgggcctaccaatagtacttggtcaaagaaggtgccgctgctaacaccttagaattgcaggttgtgggattctgcttcaaaggtttacaataaactcgttcggaagcgaaatttcgggaaatcgatatttccggaagcaaattgtgaatttcgatggagaggttcaggtagattccagccaaccgaaaagactcttgcagaagcttagaagtgaattgctaaacagcgcagatagctagatagcacgcctgatttctacatgtatcttgtgttgttgagcaagcatcatgatttaaaggtgagcaacaatgcaaaggctcttctgcattatcgcgcggtgagctggtcggagtgagagagccttgatgccaaaccgcctgaactgtcaagcctttcgccgccgagtttctagcaagcagatcgttcgcgacctggtccgagtcatttaccggccactcgttccgccatttcgttggcaccggccgcactaggtcgttcgctagcattctccacattcaaaagatgcgccgtttcgccgaggcttgcagccagcgttacgctgacttttgggagaagcgatcggattttgtgtatatggctcatcatagagcaaatagctttccagcgcaaaatcaacttcgtagatcaggaacgatattgacatccgctgagcataattcgctgtacgtggctaagttcatttcgcccatgccatcgtgattcgagtttggtcgctgcatctttcggtgtcggaatcatatttccaaaatttacttccggaaacgatcgagatcgagaacccgaccgaccacaagtcgaaatcacaaccaattcgtcattcgatacctcttctacttgctcgaggcctccttcccatcagacagcctcgaaccccgactctcgatatccacgatgtcatcctctccagccttctactctacgctacgaaagtcgggtccgatcacgtgcattactcccggcacgatccaggccaacaaggggtacgctcctgacctggcttcgcagatcgccgatggcctcttccaccctgccatcgaggtcggcttgcacctcctcaacggggatctctattcggctcatttcctggcgaggaaaatgcagaacgaccagtacgggtgagtggcaagagaggtcgattcgtgcttagaaacgtgcgccgggctgaattctgcctcgttcgtcctgcatgacgtacaacgttccgctcgactcaggatgtggttgcacggcatcctgcatcgattcgagggtgacttgaccaacgccaaagcatggtacaaaggccttgacgaagacatgatcgccgagtgcccgacttaccagtctgcctcgaacgaccgggacgccgacaaggctcaccatgaggcctttctcttgatcgaccaggtcgggctcgtcggacgaggattcggggcgtccaaattgagagcgcaatatggggacaaggcgatcgggttccccgaaagcgcgccgaccgaggaagagatcgagcaggaaaagacgaggttgcagggagacaagggcaaggaagaggtggatcgcaagtgttgggacgagttggtctggctggttgacaagctcgttgacatgtacggatgggatcggaacgtcgaggggactacggggtacaccgagagtaccgagcagcaaaaggaagtcagtcgaaagatggtcgggggtggagaaggaatccgcaagttttgagagagacacgttgccaaaacgattataatccgttgtgtccctggtcatcatcacggtcttatcgtcggtcttatcgtaaacaaacgaggcaaggacttgagcatgtcggacaatctcgatcggccatctgatcatgtgtacaatcgagacgatcatagacaagctacaagtggagggggagggctcgtcgtcatcctaacacgctcaaaagtaacctcgcgttccgaaaaacgataggtgatgcgcttagtatccgtgagcggcgagcttgtcggcggcaccgaagttgaccgacgaagcggccttttcgcggagcttgagggaggcgacctgcaggacaatcgttcgtcagccgaagtgaccttgatattgccgtccgacacgcctcgacttttactgaccttgcgctcgtggtaagcctggcccttggccttcctcttctcctccaacttgtcgacgacgtccttgtaaccccaaccgacctcgtgggacaacctcttcaaggtgcagtacttcctgccgggcttgagtcggaggactcggagagcggcggggacgaccatcttcttgaccttgtcctgagcgggggggacaccctcgaacaaggagagacgggtcaaggcggcggcacctcgggaagacttgtggggaaccattcctcggatggccttgtagaggatcctagagggagctcggaagtggaaaggaccggacttcctggggttgctgtggaggtcgagagggaacagaggttgatgtcagtcgagctcgagtctgtgaacagctgataggcacgtacaccaaatgcttctctgtatgcggttgaaagaatcgcgtgcaagcggttagtatggcgtcctagagagacttgctacatcgagccgatcggcctgaacactgactgtgcaagtaagcgtggtatcggagctgcagaaacgatcccgtcagtcctctgctcgtgcctcgtcgtggaaggccgaatgggggaagactcaccttgttcctgaagaacgaacccgagacgttgatctcctcgcatcggacgacggtgaccttctgaccgctcaagatctatatcccgcaaaacaaaagaaaaaaaacgcgaacacaacgccgacgcgcacgccaagaccaaacgagggataccgatccgcgagagccaaacgacgacaggcgaggacgacgatgacaatgacgggtacggtccgcacagagtgggattaaatgggtagaggaagggtcgagaatattgcggcaatcagccctccgtttccggttagagcatgctaaggatcgcttgagatggggtctggggggactctctctcgggtgtttttttgggtttgggttgcgaattcgttcaggtacaggggttttaggcctgaccgaacgtatcttcgacgagtcttgggggggtagcccgttgaagacgagggtgtgtgcgcccaatttcaatttcgcacatgcaggcagtcgggttggtgatgaccccagcgatgacgagcccgagtggacaaagtctacgtctttcgactcgtttgtattcccgctcgaactcgatcaaagccctgctcgcatcgacggggggaaggaacaagaaggtactcgatggtggttgtctaggtagactcagaggtagcgcaagagcaccggcctcgagtctaccttccgaaccttgaatgcaaccatgtcgtacgatctcgaccgtttgttcgtctttattccgagtaacccagtttgtggtgacaaattggtttctccccctggacaccgtgtcgctcccgacgaaataacagaccgggactttctgaactcgaaaggacggccgaggtgaatcaccaccagtacgaccgtcctcttcgtcctccgcccgacctgtatcccatcggcagtacgatcgacccggaacgtcctccctcatccatccatcatcaatgccctcgtaatatgatcattccctagaggggaatccgtattcgcgccctctggtttcgccctcggtggttttttttttgcgtctttccgaggatggtcggttcctcctctgattacgaggtgcatgagtggatcatgcgacccgggcccccatgtgcttccccatcaccatcaccatcaccgacgggacggctgcggcgagtcgacaagaggagaggtagagggaagaggtagatccgcgttgagagggagaaggggacctgttcatccccttccttcccaaatcggtacctcttccccgacctcgccgctcatcatccccggcccacccgcagccccgtcttcaaccctcctccgtcaacatccggcctcccccgaacgaccccgatttctcaaacgatcccttttcccctgtttctctcccgtgtacacacctgcttcgcaacgatcgaagcgagacgaccgaggaggtgaccttttccgtcaatgacgatgggggcagcagagaaggtggacatctgggtaggtggatggttcgtagttcgtggttcgagattcaccgaggttggtgagagtatcgagagtgttgcaagagattcgatacgatgagggccggttgtatacgtcgatttatagtgggagggagggatgatgcgtcggtcgtggtggtggttgagaattgcgatgagaaacgtcagcgcgcccgtcgtctttcgattggtccttgctaccgaacgagatcctatggactgaccttgactcttgatggatgatattgccggatcgagaagggtacctagaaggagaaagtggtcgccttgaggtcttgatgtttcgtatggatatggtcccaggtctttcgacgtcgagtccgagtgcgtgcgtgtggcccgtgctgggatgggtctctggtctctggggccaaaagctgtctcgcgcgcaaaagggccaaccgaccaacagtttcctgataaaatcgagtaaaagtaaaaagcgcaaactctcaagcaactctcgcgcttaacagctactcgctccgtcgcggcctccacctttggttgtcgacagatcactccccctgcgcggctggatgctcggactcgacgcgcttcggtgataatctccgattcccccctcccccccccttcgcaaccaaagggtcatgcacccgctcttgtcgcgtttcgagcaaacagacacggtgaaacgatcgatacatggccccaggctcttcgatgatacgacttgagagccaaagtgaaaatcattcataatgttgtaatgcttatggtatcttgatgtacaggtattagacattcggatgacgtctgattatatcgatcatccatgtgggttgcagctccaggctgcctgagtgattattacctattctataatgtccgtccaccggcctacctcgcccctcgcccctccctctcatgcatcctgatcgtccacctcttccggactaggcggcaacctgacgaacagcaagacgagcgtagccgcgagcgccgtgatgccattcgcgaggaagatcaaattaggcctctccctctcgctgaacacggtgaacagcccaccgaacacgctctgacagatgaccgtggccaagagttcgatgagcgctagaccggagagcgcttcgggcttttccgaggtggtgaccatctccatgactacccccttggcggccggggccgtagcgctcgcgagtggcaagatccctccagctggtaacgaggacgagcaacagcgtggagcgacggcggtgtgaatgtccatcagcgacttgtcgacccatcgtttcctctcgcaccccttccagccactctgttcctctttgacacaacactcaccgatatacatctgccaacccttgttcgagaaggatagggtggacgtcaagatggcgtcaaagagacaactccaacgtaaaaagaccaggtcgaacgcgctctgatggtcagactctttcccgtaccctccatgcggatgatccaccccggattcgtccgaggaagaggaactcgtcgtcgatgggtcgctcgagatggatatcccactacgacaatcggcctcgtcgacgtcgacgtcgtcgtcatcatggtggccattgacgcggggacgggaagatgcgcccgaggtggacccgtaggacgacacgccgcgtttcaaaggcgctcgccgaccggtcgtcttttcctccttgtgagcgtaccatttcctgccatagtcgatgatgtgaggaaagacaaaggtgaggaacatggctcggacaagagcgaatgtggacatgaggtagccgttctacgagcgggcgggcaggtcaggtcagaggctggaatcggcgccgtcgattcgaggaggacggatggacttgcctgggtcgggcggaagccatagacattggtactgaaaagttgcaacatgagaggctgtgacattgccaaaagtcagcgacccccctcgctctgtcctctatgccatagaccgtccactcaccacataggcagtagccaacacgctgacgaacgtaccgatcgcgagcaacgtcacgccgtggtacttttccccatcccaatcctccaacctcctcgtcttgaaaaccttgagaggcttgaagaaccctcgaatttgctcctcgatgctctttcttgcgctctgtcgtttgcctcgctgttgcttgttcttcttcctcttctcgccatcctgcctgaaggcgtcgccctcggtgtactttggcgcaacgtagggaaggacgaggtacgtctgcacggtgaacaggaacagcaaggcgagggtgacaaagaacggggccgtagggtgaacattgtcattgagcatcccaccgaccgtaaaggcgagcgcggtcccggccatggcaacaccttgcaattgactggtaatgaaatcgatcaaagagttagatctgaaccggctctctgcgggtcagtgcaaggtatccgtgacaactcacccaaagctccccgtcctcgcatgaggttcgaccacggctccaacataattgttggcactgagcaagtaccccggtcctcctccaaagatggtaaacacctgcgtgatttggaacacaagcagtcccgcccgacctcctttccaaatcccaaaaatctgacccgcattccggaacaagggccagagggattgctggatcagggtaaacctgatgccatagtttcgctgcagccagccagtcgtcaagaggttgaggacgccgccgatcgtcgtcaggatgaccactgcgagcgcggaaaacaaagaccatcagctggtcctcgattgctccgattcacgacctccctcactaaagctgacagcctttgcagtctgcacatcgatgggcggtatggcacactgatcgccggtaccctcgtatggcttgtgatgtcggtaatactcctggcacgtcaacacccgataagcatagagcatgggagtgttggtgagcccaaaggtgaacgataggctgaagacgacgaggagcatccgacggagcggggtgaaggtcgtcttttgcatgaccttggtctgggtatcttgacggagcagcaagggttgctgctccccattgttgccatcctgtgatgacatctgtggtcttgttacgaaggttcctgagcgaagagatccgtcttctgatcttgatggatgctcaccagtctgggatatggatttactcgaagtcgatgtcgacatggactgtgtgaggtccgacctcgctcaacgtttgcacgatcggtcgatcgatttcggcgtcatccgttgcgcgcgtcacagtcgtcaactcagatcaagcccgagcttcctgatgatgataaacaccaaagagttcatcatcccttcactacacatcttggatcccatgagtctacggaatacgcctctgcaaccactccatcaagcatccgaagcctagaattcgacatgttttacgacggaaacctcacatccaggagaaaaatcataatctagggtcaaaatatggtctgggaggttgaagccatcatgccacatagcttgcacacagcgatccatccgattcccgtatgatcgtactgggtgcagaagctctcgaatctgtcaagtttctttggtattatacgtcattctacagaattattacatagttcggttatgctcgaggattccgtcgagtctatcatggcggctaagacctcatcgccttgatgcgaaaccgacccattcttggcctcttattccgccttgacaaacggtcccattcccttggcctgttctgccccgtctaccggcttcacccaagcacccctgtgctccgaaaatatctcgacctcgggcttcaacatcgtgtcgtgcaaacgatggtcgtcgatgatccctccccgcataaacttggtccccggagcgacggtgcccgcgcggaacatgagcgtcccacacgtcttgcagaacgagttggccatggtttcacccgtcgtggtcgtttttgactgagaaaagaccgtcaggttgtcttctccccttgtgaagcgggtgtgggtgtccagcgaggtaaagttggtcgcaaacatcgatgcggagactttacggcaatctgcgcaatgacagacgaaggtgttgacgaggccaggcgctttcagcggctgttgataatcagcacaataaacatcagcgaccaatctgcctgataacgagccgaggtagaacaggaatgaggaggctgatactcacgatcaccatctggacggcgccgcatgcgcaggtagccgaggcttcatcttcgtttgaccagccatcactggtctggccttggcaggggaatgctgtgggattctctgcagctgtcgacattgttgtaagaggcaatctatcgctatggattgatcaggagctaggaggggatgagttgagctacagagagacagcttgtatgggtagcttgactgaaatgtatggtggctgttataatctcgagttgaacaagtgacgaatgaccaacactaacgagatccaccttgtagacccctctgttgactaacccagatttcacgcaccagataagagcttaccatatgcatcgccgaagcacacatacagtcataaagaaagagcgagatgccgctcgatcgctcaactacatcctgacccaccattattaatggtctccttttagcctactctcccacgccatcatgtcagccatctctcaaacatgacgatccatgtacaacgacgggttagatcggccgacaggacgcacgaagcgatccggagttgtcagcagggtgtagatcacgtgtgttcgcatggagctcgtgtctatcagcttcattcgcttccagaaccaatacgacgtgggtgcgatacagtgttgtggatttgagcggttcatgttcggtttccgtgtggtgatctgcactcaatagccgtgaagggctggctctcaagcctgcatcaagctgaacgttcggagctggccagctctggctgtcgacaagagtggacgtatctacttcgtttgaggcaacgtatggcaggcccgtatatcaccaaccaactttcaacacctccgtcgatcgattactactatccaatcatccagcgtcgcatttacttatgtgcagctcgacacgacttatcggacaactccgattcgcgactcttccagcgttgagccaggtcgtttatatcttcctagatcaagctacgagctggccgacgaagatcgtttctatgatgatcgtctcatttgtagagaaacccatcaatctgagacgataggctcctggaaaaagttgaacgtacacctctggcaacggaggtggtcgaaaccgtattgatcctctgctttacgaacgcaacgacgatccgtcggtgcaacagagaaaagcatcgttttttatgggtaatacaccgatgcgtatatatgtacacctttccccctttctatagtgatgtcggtgcgatccgtcgatcggcaagctatccgtgctcgattccaaggcgccctagcagaaatacagtctagagaactcgacgaccgccatgcgtgttgtgtctatcgaggttgatctggtcgtcaaaaaaagcaaagtcccagtcgatcaagcccacttggcgagcaacgccatgagaccgcttccgagacatatgcagacaaaggcaaaagtcattcgtccgttcgacgacttcatcattcgggggttgagtaggatttcgtggcccaagagctttggtagagacgatattaaaacaaaagtcagaaaattgatcggcttgtagacagtcgtcgacggtcttgactcacctcgacgagtccggtgtagagcaagataccggcggagaaggcatcgagggtccccgaagcgccggccatggccgcaccgttggtgttcagcgattccctcagacccagtccaatagcaacaccgagaggactaagtggagaagtgccgggtcgatgtcagattaagcttgcatcagcggagtgaatggataacactcacgtcataagggcataaaggacaccagctgcgtaaggagcgaaacgcatcctatggggaagacgcagctgagacagacgagatcccaaaccgagaccctcgaacatttctatcagcgatgaaacgtccggatcagctcgataatttcgaaacatacggacagcgactagcaactcacggtggaagatgatgacgatgaacaaggtgataaactcgtcgctgagcgccaaggtcaacccgatgacgatcgagtgaaggatgacaccaaactccaggacggcgacggcgatcaactgggcgataccctccgaggtggaaacatcatagtcggtcctggcggcatcgttgtcgaggctgtcggacgaagcgaatccagcctcggccatcttggccttgcttccagtgccggcgttgcttcccactccctcttcggaagaaccgacgggggagacggcattaacgtggttctcgtgcgagtgaccgtgctcggcctcggcatcagcatgggtgttgtaggtcaatccgagcttttgcatcttcttgtttccgatcctgtaggcagcgacttcggcaaagaagatggcgtagacggacatcatggcgatagccggagcccagtcctattcaggcgaaaagagggatgtcagctcgagctagtatgccgcatgatccaggttgaaaggtgattactcacgtattcggtccatcccccggtgagacactccgagccgagcgcttcgaaagcgggggtcaacaagctagcaagtcaaggtcaccgggttctttagcctcgccgttccgtttcgtgataggaaagacgtggacatgatactcactgcatgaatgccgtcgcgatgatgacaccgctaccgaaaaacttgcaaaagtcaaacacgagcgggtgggcgagaaccgacttcgtacgtcgcagcaggatgggcgccaaagtcccgatgatggaggttacctagaggtcgaatcgcagaagtgacaaaggtcagtcccctctacatatgttacatgtggtcaagagattatctcgggggagtcttggcagcatccccgctttggtcagcgagtgtgggaaactcacgaggatgatgaagatagatgcgatacggagaccatgcctcgagtcgtcaaaggcagcagcacacggatcctcagcgacttcaggggtgttctcagcgggggcgtccatcttgttcgtaaagatcgttcggtcgttcgagatcgagatatactggcgcgataggcagaaaaggtttggctttgcagatgtgggagtgtttcgtaagatcgaagtaaggtacgaggtcgagagcttgatgacaccgcaatatatatcccaaagttcagataggctaaatgatagtgaggttattgatgatgggtttcccgtacgtagtcgaggtcaccgagaatgtagttgacgaaagatcataccgatcgagctgaaaataaactgacgagctgcgcgagctgagaggtacgaacggtcatcgagattgctgtcgcggtccgatattcgcatcacctcgataacctcaaagtcctcaaatcctcattttcacggctcaaaaactcgccgtcactgccccgcgcgcgcgtgtttcctttgaacgccacgaagtgcaaaggtgggtcctggctgatcgcatggagaaaataaccgaattacattcggtccatacccttgcaggccctgctgctgctgcgctcgcgtggatagaagggaatcacggaagaggcgccgatcaaactgccaccccggcccgaaacgacgacctctcgagaggatcgaaacacgccatcatgcacgacgtctcatcagatactgcagttcgataggccggaacactcagattaaccaggtctagccaggctagggtactcatacggctatttatggatgctgttatgcctacggagccgatttgatacgccgaggtaaacgaagcccggacgtgttgaagccgcaccccgactcgtaatcgcgaagtcgcacgttcagccttgccagaaaacgaatcttcatcgaaccgtaggtaagtacagtactagtacacatcgaggtcatgcgtttctatttctggatgtatgtatatcctaggaacctcaggtcgtcttgtacgaagcgacgcatctgtcgctcgtcaaaaagcttcgggatcgggttcacgtgcatctacgaggactatcaagctgtgccatatctggagaggaagatggaacccacgacctggcttgaccctgacatatggatgcgctactggacgacatgacctaacttcgcggatgatttgcagctcgaccttatagggtcaggcaggcttgaaggtagtcgtggcagctatccgtaacaatgtcgatcgttcacattccctcgagctgtactcagcgtgtttaagactcttcgatctgttcagaaactccgcgaacggcgcataaaaaacctatgacgtagctctcaaggacgacaaccgaccatacctccagccagaccactcgattggcgcagcgcagcctgccgcaccttataacgtgtctcctccctcgactggaggtcgatatcgatgttttaaggagcaccgtatcggagcacatgcatcgcgaatcgaatacccaagatgtccagaagctggagatcgagtccgatggcatagttggcctcgtctgcagtcatcttgaccctcagcttgtgtctgattggacacagctgaccaactgagacgtcgattacgagtcgcgaagcgcgatttttgaatggtgaacaccaggcaatgcacagattggcaggttgtatgttcacgatgaaggatcttcgcaggctctgacccttcattgcggcaataacgcttacgatcacgacgatgaaacacgcctccccctaacagcttggacatagaatcggaggctgctcagatcgatcgagaagggctggtcgaaccgttaccagtcgtgccgaggagtggctacgctttcagcgattatataggcctccttcgggcgagcttggatacataaaagcgggttacggagttatcgcgtcacattcgaaagattgggaagacccagtgaatatgtacgtttttgtccgaagtccagtgtgaatgacttgggtctcaatgtaccccgagtctcgaaatgatctttggtgctaattccggctatcgagccttcagctcgaaatcgagagatagcaacagcgacacttttgaagcaatcagtctatctgatgatggaatcaaaatatcttaatgattgacattgcgaaacgccaatcagaccatgacggttgcatggcacatcggtcttttgctgaaagccgtagcgcatatttagaaaaattcagcgtagcatgtcgcagcctatgtgactgccggtctcaaaaaggatgatactgatctgcttgccatggcaccggcattggggttaacgagggccgcagatcaagccttgcgcttcgacctggtcgtgatccagcagctgaggtcatccttcagtggtccttcaggtggaggagattcacattgtgcatcccagctcttctatatcagcattccatgacgaagaagcgcgaaaggttcaatgatcttgaaacaaacgtcttcgttgcacggtcaggacttgtgcgcttgtttgcatccgacgatgacctccacttcctgaggctacgattagttgttcaggcaggagtccgaatgaaatagtagtagtagtagtagtagtagtaaaccatacatgccatacagtcctgccacctcagcgagcttgataccaaaacagtgacatagcataggacttacagcttcggcgccatggaagagccactcagcaagacgtataggccctacttcacgccgaaggaggtcgcagcgttgtctgcgagacagcggggaaagcagtccaccgctagggacgagaagcatcgtcagatcgcttgtgggtttatcgaagctgtcggcttgcgagcaggattgtaagcccatcaagactagtggattttgaatctctaaattcagatcctacatcccacagtccccgaagaacggtcgcaacagctcagtcattatatcaccgttttcacctgtttttcccactcaaggatttcaactatatcgcaagtatcgagaccactgaagctgttgcgattgctgctcatcaacttggacatattcgcaggaagtctcgttgacgaccttgtacgtctcatcgaaactccacgacacactcaagaagcctcgagacatcatcctctcgtcctatgccatccgatatcccgaactcctcaaagggaggtcccaaatcgacatctcatcggtcgatgccaagcagctcgaacacgatcggagaaaagtcttgaccatcgagaggctcgtgctggagacgatctgcttcaactttttggatgccggagcgggggctgggaatggaaaggcagatgtttttgggctggtcatgaagctcggaaggaagatgggctgtgagtcgtcattgtagtcgacacgtcgtgcttacagcagctgactataggaccgagggtaaagtctcgaaacggtatattcagcacgcctggcgactcgcaatcgatacgtgcgtgccgatctccccctcctgtcgatttgacctgccatcacaagctgactttgcgaacggtctgcttgtcagtttccgcactttggcccctctacagcaacccccgcacatcgtggctctcgcctcgctttacgcaacgtcgctattgttggttggaccggttgaagcggatcggctgaggagacaagatacagggcttggagaggcagatcggctctcgcgagagcttgtggacgaaatgacacgcgggaggagggtattcgaggatgatacgacctgggaagacgaattgctggcaacactggccgatttagacggtaagttcgagacggatcagatcaccggtctgccaaaccctgacgtcgagctttcttgcggcatgatagaggtcgttcataataccttggacgtgtacatcacgattatcagctcgctgaccttgggcggagacgcgtcttcgacaccccttgcgtcaccacattctccatccgatcccacaacatccatgacctcggcaacaactgtcaaccagcatcagaaccgatacctcattccatccttctcccttccgtcatactggacaacgagtaccctgactcagctgaaaatccagttacatcattccagagcggaaggaatcggcggtcgaccaaagattgacctgacgactccaatcgatatgacctttggaagcgggatcagtgatggagcaggacttgacgggaagaaggacgcttggctaagtctgatcgaagggcttggcaagaacgagggaacagtgcggttcgtgttcggctgactgagagcgaacggatgcatgaaacggaaacccgcatgactagtatgcggatccctttgagcgactccttgaaaccgaggtagcgcttccccttcaaacctcgggagaggatcgcgttggtcccatatcagtagtgatcagtaataacatgtttgtctggcaaggaccgccctgccccattgtaaaccgaatggtgatcatcaatggtcaacacggcgaccttcctacgttgaactccctacgcatattcatcgacctgccgaagtttggaaccgaaatccgatttggagcgactattgacccattcgccagatgctctgcttgacctcctcttcccgcctggtgctttacgccttgataccgctcatacttcggcaacacatcgtgtcggggcagagcgacacctctattcccgccgacgccgatccagcggccggtgaccacccaggcatgtcatccgtcgctgacgtcggaaacgccactaccgctgtcgccttggactcgcctacatcgacagtagatgcgtctggggcggcggctactgcacccccagggaacgcttctgtacctactgagcaaccacctactccggattacgaaagcctgatggagccgtattacctgttccgacagcgtttcttaggcaccgacgtgagtcaaatgtcaacgttattaccgatgatagcattctgaccgataaaatcttcatcctgcgttcagtgcgcgaatcacaaggcggacccggcattctatgcttgttgccacccgttaccgaagggcggcacgcccgacccgagctgtttctactggccccaggaggacgacccttgtgaagagggcgacaaggattgctattgtgaagaagaagaagaagaagaggaaggaggggacgacgagaacgcggacattgcacctttgtgacgctcgttcgatatcatggcgtttgccttcaaacccatttctcttcatcttgtacaagcctcttaatcacttctgatgaccgtttcatgatcagtctaagccttcaagtacttggcatgaaagtcgacgtgatcggcggcgaaagtgctgataaaaaagtatctgtccagccagagtatcacgatgacctcgctcagtatccctgccagcatccgggattccgaaaatacgtcacttacgaatgatcatacccttccctcctcccgacctcgatctcctgttccctaccagcatccttggcagccctttcaaggttttcgggcaacaactgtccgtcgttgtaaaacttgtcgccggtaccatagtcgatcttgatggcgaccttttggtctttggggtaggaagcgaggaggtgggtgctgtcatgtttcgacccctctgatgaagggtccgagaggtaaccttcaaacgctttgcgtccccattgacattcggtagggttgctgcaagtcggccagggtggggggatgtaggtgagcgggttgcttacgtgtcatacttggtagggggcaggagcagcgtaccagatgggagcgaaaccagaggctgatttgtattggcccgggtatttgaggtatagagacaatgctccgtggcctgtcatttgtgagtataatggtatcgcgacatcagttcacctgcttgatttgcgtaagcaggatcgagtgcggcttacctcccatggagtggccaaagatcgacgtcctctcataatcctgccgacggcacgagcatggggatgataatcaaccaccagacttacccgatcgacatgtagcgcagactcacgaccggcaactctgactggacaatctccctcaactccttcgtgacaaacgcttccatgttgtaatgctcgctccacttgtccttgctcgcgttcaggtagaatcccgcccctgtcccgaaatcccaatcggcatcttccccatcgattcctgcacctcgaggagaggtgtcgggaaagacgatggcgatgccgtgtttagctgccggggcgaggaggtgggatttctgaggacccgtatcttccgtgcaggtcagaccggcgaggctgtcggaaagaggcacgagtggatcaatcgtccgccggtacgagctggtgttctggtactgactagtagaggacgggaactttgctcttctccgcctcggcggggataaagacgttgaactttgtctcgaggcctccgagcgatttggagttgaacgagtactttgtcagagttccgccaaacgccttgttttgggattcttgcttgagggacatgatcgtgtaatcgagagagtgttagggttgcgtgctgctgtcgagtttcaggtgaatttgaaagtaagtcgagtctcagaagcaagaagacgagcaagacgaggtcatttcgatcaagagagtagtacacctgccccaccaccaacgaacttggttgtcccaccaccctcccaacccggatctgaccgagatgacgcgtttgggggaagggggagggggcccccttctctctgccccgtctctctggcccggcgatgcctcattcgcgtaatctctcgctctctcgttgccgggtgcgcgcggggaggtcgcgcgcttttaacagcccccaagagtggttggtaagtctttgacggcattctgacggcatcttcgtaatatctcactgtcgtaatgatgatgccgtcattacaggattcctcacaaacacaacaacaacaacgaccaccttacgatcaccacaacaacaaacacactcgagacgatcccgggaaggaaattagatcaacaacaattcatcatcagacttgcaacccgtcaactagtcatctcatctccatctaattcccaccacccagcttcatctcgatctcgacctatactaccgagcaaactacacaccctcacgacccggtcatcatggcagggttcgacctcgccgatctcgataggtccgcgttgcaataccgtatcgcccaacacgaacaacacgaagactcgctaggcagcctgcccgatctcatcgatagcatggccgagagcatgtcttcctatccggcgactaatagcggagcgaacacttcgaacgatggggaggattcgagggatgtggatcggggcaaggagaatcagagccctagggtccccgacctgtcgagaaagtcggtgggtggcaagagcgaggtgagtcgtccggcaacgagattcgagttactgtttgtcaatgattcgctgatgggatacccgcaattttctagagccttttcactcctatgcttcgcaagactcttcacccgacgacccctcaggaaccctcttcccagacgctcaccccggcctcgcaccgctccttcatcgtccctctgaatgacggcgacacctcgggctcttcatcttccttttccgcaggtaacggtcccatcacctcgaccccggtccatcaacgagcacctcgacggtccatgctgaacgagagcgcagggagcacgatcccaggggaacggtcgagtgcggggatgatgtccaccatatccaccatccgaccggccgtctccacgagacgagcccttcgatcccctccccccggatcgaacctcaatcagaaccatacgaacaccccgggaagctcgacggattcaacacagaccaggagattcgcctcgtcactctcccgccggacaagggagaaatccggctcggaatctttcgtcccggatccctcgttgatggatgaacggagcctgtcgatcgccacgatccagcatgccggggatgaggatgacggggaacaagggttcgattcaagagagttgcccgattcgcatgaagggagtctggagcgtctcgatgtgagtgggcttgaatacgggatcgatctcgtacaagaggaaatgtcgcagcggtgactgactttgatcatgcgtgctcgattataaacaggacgacgacgacgcatcgagacaatcttccccggtcgtccgaggtaactgggtggacacgaggaaacgatattcccgctctgctcctcgacatgcgtccacctcgcccttggccagtcccgagcccgtcgtgctcgctcgtcaaacgtctcccttgcgcgacgatcagagcgtcagttctgctggatttagaagggcggaatcgacactcgaggaagacgaggagtcgagggagacgagatcgaccacgccgttacaggaagcacctcgggtaccttccctctcgagaacagaagaggacaggagcgacgacgaagatgaggactcgggcgaattcaaacgtgcgacccagacgccggagcaggacgatcgggctgcacagctcgtcactcccggtcgagcgtcaatgcggcgtagcgtcagtttcggagtaggaatgacccctggtggactcggagtcgtcgatgaggaaggcgagagcttggaaatggtcgacgacgaggatcagagcggattgcagcaagatcaatcgtccaggcggaccatgaggagggtctcgtcgcatcaagagttgaagaccccaatggcagctcccaagaccgcggatctgacatccgccactttgagcagccagttcactacgcccggagcggccaggcacttgtccaggcatgaatctcccatggaccgttcgtttggcgatcaactcgatcgggatctcagggacgaagatagcgtagaagccagtttgggcgagctcggccaaagtcaaatgtcggcaatgggcgcaggtcagacaccgaaagccgcgatccctcgtcgtttcatgagcgaatcacccgcaccttccgctgcaggaggggtcgaaaagagtttcatgcaggattacgtccgcaccgctcttgaagggagtgtacgcaagtcgacgctgtctatgtctcacgcacgtcagagtatcggaggaaatggcgtccggacgaatcccaggtggagctcgggaagcaggtccagcacgacctcgggttccggtcgggaagaactcatcgccacgcccgaacttggtcaggacgagatggaaagcagcgggatcagtttcagaatggaccattccctcgctcgtagcatgcagaggagcgtgatcgggccgttccacaagcgattgatggagactcgaggcaatttgagggcgagcgtactgacccaaggggattccgacgaaggggctagcaatcaatcgttcgtctcgatcgcatcttcggccgatctcacctcagacaagcgtggcggcacctcgaggtggaagggcaacacctcgttgccgaccatcgggattgacgatatcggcacacatgaagaccgtgctcaagcccccaaaatcgctcggcatttgcatcacatgaacgagcagttgacggcggaaaaccaaagactgacagaagagatgaatatgctccgggatcaacttcaacagacggaatgggagagggatgaaagagaggcgcaggagaccggatcccgctcggtgtctatggacaggtcgagagcagattcttcgtttgtcaggacgaccggcgcgcggaacgagcaggttattcgcctacaggaacaagtggctggactcgagcaggcgcttcgagcgaccgaggacgagtacacggccttcaagcacgagaccgcactcaagattgctgccgccgcctcgaacggatccgagaatgggaggcttaaagagctcggagaggagcttgaccttcagaaccagctcacccaggagcatgaggatgagatcgatcagctgcgcgccgagttgaagaccgtcaaagaggcgagcgaagcatcgaccggggaagtcattgaagctctcgagctcgcggttgccaaagagaaagaactcgcgcaacaagtacagagcctacaatgggaaaaggctgccgtagaacaggaaaaagagcgtctgaggcaggtcctggagagtccggacgcagacgaaaaggaacgagcgttacaggctcaagtcaccgatctcggcaggcaagtgcaaaggctgggagacgacgtcgcgcgacgagagaacaagattgtcgaactcgaagacgagatcgacaaagctcgagccgaaatcgccaaccgtgatcagcagttattggatcgcgaaaccgaagtggacgacttgcaagagcagctccgatccaaaggagacttaaaggcaaacgccgaggccgccttggccgacatggaagagagcacgcgagcagagatcgaccagttgacacgggatctagagggatgcaaggaggagctcgagagatgcttcaaggatctggatgactgcgagcttggactgcaagaggaaggtgacgccaagaacgaggctctgcaagccaaagctcggttggacgcggcctcgctcgagcagcaggccaccattgcagaactcgaagagcgattggttgacgcgaagcgggccaccgatgagcgagccaatactgtcgccgatatgcaggccaaactcaataccgtcgaagccgcactgtgcgcatccaagaccacaatctcggcgctcgaggcggagttggccggaaagagtccttcaaaggccagcacggcctcttcggccgagaggcactcgtccttacgtgctcgggaagacgccgctatcatcgagtcgctcaagacgcgcttgtcacagacccaagccgaggtgctcgaacttcagcatgctagattcgaagtgacaccggcacaagagacaattgtggctgctcgggatgccaagatcgaagccttgatcatagagaagcaagagctccagcaagaattacgggtcacacaagtccgcgttgcggatccagagtccacgcccaaaccgatgcggaccagcgcatcgatgatgggctcgcccgctccacgatcgtccctattcaataagcacctcgccaacctcaggaccccccgcacaccggcaacgcccggaactatgcccgaggtgagtttcctcgaagattattcatgcgacagtcatttgaccaacagtccgtaattgcagttctcgttcctcaacggatcggtttcagaagacgacatggaaaagagcatggtcgaacgttatcacgaactccaagccgagttgcatgaagcgcagaagcgatttgacggcaactttgagcgcctggagaaagcaaatctgacgacgttccaaatggccgatcgccttgccgcagagacagaacgggtcgtcagtcttgagaaacagattctggacttccgaagacggttcgaaactgtgtctcagcgtttggagcaggtcaaatgtcccgattgcgagggccaatttgatgccagcaaatttgctgatctcgatcgaagcgagacgtcgctattgtgagagaggcacgtgaacgtcacacgtgattactatactgatgcccttgtcgtgcttctcagggatatcacgctccgtccgaaatctacacaacgagacgaactgaaaaacaccatcgcttctctgcgatcacagtacactgtactgcaggagcaggtcaaggtcgaccgagagcgagtccgtgatcaggagcaagagatcgcacgactgcaacgcaacgccaggatggctgagcaagcggcttcaactgccttgaggcaagcagaagcagatcatgatcgacaatccgccgccctgcgcagagagaagcaagcactggagactgagcgaagattgttgcaaactgtgagtttgactcgtctccatctcccgcaaaagatcgagcttaccttggaattgggcgttggacgacagaaattcgagcgtactgagaacaccttgcgtgaaacgcagtctcaagtgcgcaaggtacagcaacagcttagggagactcgagtgcagctccaggaaaaggctcaccagtatcagacaatcgaagccgagcatggtctcgcgaaagaggtaagcgttgacacaagcatgaatgtcgttttcaagcttaacggtcaaacacgataaaaacaggatatcgcgcgcatctcgaagcggcttgtagagacggaacaaacgaactcgaggatggctgctgactctcaaggtatgtcgatccagcagagtgctaactacaatcagactcatggaccaaactcgtacttggtcgttacagcccgggctcacaaggaacgcgatgaattgatcgctagccgactcaaacgcgaggccgaaaattcgcgtcttgaaagatccttagcggagaggcagagggtaaggctgtcatgtacttggattcgtgattgtgagctgattatcacttcccgcattataggaggtcgaaatcgctaagaacgagctgcacgacaaatcccgagctttggccgaagccgaaaccaagctgggggcgagggccgataattcggcgacacttagacaggagctcagacaagtggaagctgctttgcaaaagcacaagcgcgaagcagagaagttcagccatgcagttcaagccttacaagatgacagcgagaagaaaaccgcgaatgaggtcgaactccaagcgttgagaagcgagcgagcttcggcggaccgcatgatcaattctctagagcaagagatccggaagctggagactgatttgggagaaaaggagcgagagcttgtgatgcgtctgagcgctgggtaagcacaggatgtccgtgggacttagttgctgcgatgttgcggctgactggaatgtttcttatcgcagcgaggacgaacagtcgctccttctcaaaaaccgtgtcacggatctcacttcggaccgcaaaaaactgaccgcgcaagtacgctacttgcgtgccaaattcgctcgggagaatactttcaagaatggcttgacagtacaaaagcactaccttctcagactcgttgggcagttccgtcagaggtacgtaccctgcattcaaatgcgttcatatcgcaaatactgatcttgacgaatgcagtgaacgagaaaccctggctctcatcgcatcgatgggttatccctccacgctacagtcggaagctcccgtcaagcggactttcaaggcagtggcgttggctatccgatccaccatcagaatgaagtaagccctctctcagtaatctcagctgctgtcagtatactgatgcccgtacatccaattccgctaggcgagccgcgtcgaactggtcgagcgaagtagcacaacgagaccgcatgctccaaggacaccaatccgcaagggagcccagaaccagaacaaccagtttgaattagatcttgaactatacgaccattcgcaaatgtctctataccgttgtaactgttcttggccagactcgaaacgattgacgaacacctacactattatataatgcaatgtccgagagacgacatctcgcgcgaaataggacgatcggatatggtcgggcggggtctcgagatgggttactgaggatgccaagccagacagcgcctcacgcgtttgacttgcacgcagcgttgtgatgggatgagattcttctgctgttggacagcctgaagcttcgttctgcctaagtgggaaaatctgctttgtgctgccagtgaatgctaacgatctggcaaactagcaaaatgattatcccagcgcagacttacaccgaaactaggtccggaaccatttaggaaattacttccgggctcgacttgccgatcgagcatccctcaataaactgccagactgagtaacgagtaaagcttcgacttataccaaatcctgtgagatacggacagagaccatcaggtccgacgcatctcctctgatatgatgttactgccaagaggtctaacgaagaaaaaagtggacctcatatctgtcaaacgtcggcgaatcgaggacaaagaacggccgtttcgaaaagcagcaggaaccccagctgcaggcgatgcgatttccgcacgagcggaccccacgatagagcagattatttggacaaatgcagtctacgtctgtctatttgagaacgtgttctcgagtgatgatttaaagttggtgcgccagcctgtgacaaattgtgagcatcgaggagcaatttgtctattgcagaaatcggagctaacacgccctgaagtcgtgacatgtcatagtgtggcatcaaaggcgaagctgaccgacgtggcgccgttggacctcgtcagtgcgctgaggttggttggagaggaccgaatacaaatcagactagctttaggaacggaagaagcagaggctggcagcgcctttgaatttcgcttgctagacaccgatggaaccaatatatttgagaatatcagtcatgtggcctacctagtaagactcaggtcctcaagtctcctaggaaggcacgaaatgctgacaaacatgttcacaggagtcggtgcccgccctctatcagtcgatcagcggtattacgcatctagtgcatcgaaacttaaaagaggacactgcttcctctgccgctctgattcgtgggatcacacccatcggtctcacagccaagaacgaatcttcgtatgagcaagtcctgattgccttttccgatcattcggccagagaggagtttctcggacgggtcccgtggcacgatcaggcggtgtcgggaaatttaccgacattctgttcttgcttgaaatcctgctcgttgtgagtaattctccattgaaagggtggggtgatgtctgttgaaatgaagctctcaacctagcgaacggtttgtggccctcaaagaggaatatcttgctcatcaaaacaagttgaatatgcgaatggttgttgaacaacccgtcgcccaatcggcgaggcccaactacgaagcaccgcaggccttttcttccgtaccgagatcttcacaaccaccctcatttccggtcttccaatccaaaaacctctcatatccacccggcagactattgttcttgcgaaacgtgccgaccaacacaaacaagacggccatcagagccgatatgactgcactcctcggcgagttcagcaatgtcgattacgtcgattggtcaaaaggccacgatactgtcagtctcaatatctacaaagtcatctatcgcctttactgattgtcgatgtgacgacatccaggcttttattcggctcggcaggacaatcagcgaggaggtcctagccgaagtgctcgagactggtacgctggagggtgacagcaaagtcgagctgctttcgggagagcgagaaagcgtttactggagccgtttaccggaaaaagtgaatagatttgtcaaagagaatcaagcgcacgcgaagctgatattctcccttgactgcacctcagattcgcgctgccgccaaggaaggttgatgaacgcccacgaacccttgatgaataacgcctatgatgattaagccagagcatgactttactgcaaactgcaactgcaatcgatatcgatcgaagatctagactcatgtcatgtatcgatatgccttcctccatagcctgcccccgttgatatttgcgaggcgaggacctgtcagcggaaggctgagacctgacgctaccaacatgcagcagtccgaggtttggcgtggcatcaaccttgtggtcgaaagtatacatcatatacacatgcgcaggtcatgactgtctaaggagagaggaagcactggtatacaacccgaacgacaaagagctaattttatacagagacgggacagagaccactggccttgtccgcgcaatacgcccgacccggaccgccttctcggaacttcagctcgaggccgtcgtcgtagcagtggccgtagtcttggaatcctgcgtctccatctcgaggtcctggtcctccttctttttgagaacgatgggctcgacgcctcgctgcttgttgtctacccctcgaccggcggttcgttcggcatcttctttggtgtaagaaccgaatttgagctccttgagtcgtcgccttatagttcgtgatggtggagacgggtaaaatgagctcgccggtaatgtattagctgaagtgagtcgagcaaacgtacttgtggactttggatttggtgtggttgaccaatgcttcgtccgattcgtagtacctatgagagtgaatgagtcggatgagctgcagatccaaacgaacgagcagcggtgcgaggacgagacgtacttggcacattccagacagtactatgagggtccattgtaaaggcagagatcagcatcttcgtaaatcacgtcccgcctcgaaggcgcggtggtcactcacgtgttgaccgagaccaggcttctcttcgtcgagctcctgaacctccaactttgctttgttctcgggtttcatgtcttcgtgttgaatctgatcgatatccttagccctggctcgggttcgggttgctcggcgaacatctcgacgagcgttgtggactctgcgatggtataagatcgaatcagatcagaactacaccgggaacgacgaaacgccgttttgaatcaccttgatcttctaagacgacccattttgtagtagttgggattctgttttgtttaacccagtttcaatttagtgagagttcgaaagatatttctgcatttctgaccgctgatcgcccagatttcaagaataaacttgctcgctcggctttcgggatctcggcgaacggacatgaaagagttttgagatcgaggctcgagcaatctcaatgtccgcgtttcgttaacgtaaaccattcggggcccgccgccgcttgacccctcccgtcgttcgagatcactcagcgggaagttgcttgaacatcatcccgagattgcaagatcacctcgggccgcagtgtgttcgttacgtttaatcagcaggcagctactatattctatccgttgcgatatttcgacagcactgaattcaaaagcgtcttgagtgcgagccagccttgcccaattacagtaagaatcacaaaatagtacatcaatccgaacaagcaagcaggaaactaccatgtcgaacacgattgcacctatcccgacgctcgtcaagtcttccctttacgaccacgccgatccgctactgcgtcgtctccgactagaggatccgtatggcagacctattgataacctcaaggatgtctttctgggtaaagagatcctgatcttctatgtcggtagcatgcacgggaatggtacgcaaacgattcgagatctgtcaactagacaggtggaatgagcgctgattcctggccgttacttgttgcatcttagacaacttgactgatcttaacaaagtgacttgtggattcgcagggaatttcttcaaataatgcacatgctgacgttctgcatttgcccccccttctaggatctggtcaaccttgcccttgaccaacccaagacgtgctctatggtctacgtttcggtcgatacgacccaaacagcgatcgaacgggtagccaagaataagccattcctacgcatgagcttgctagacagttcggactttgccgtcatggagagccatgacaatatggatgcaaagaagagggtggccatggacgaggtcttgcgtgacgaggactttgtcacaggcgaggtaggtattcaatggtcttccatgcgtggcatagtgattgatcagtacgtacaatcctgctataggaatatgctgctggtggagtgaacgtgccattcggcaaggaggacgatcgtgcgttttcctgtcggatttggcgttcgtgagatcatgggctaattcctttgctcgccgacccagcttctgaatatgttcgacctttgtcgagggcagcgatcacgcaattgactcattccttcggaactccggcactgcatgtctagtaagcactttcgcgccgctctttaccctattccaccatctcattgtggctggtctggccccaacttgtagtcacatcccgtcgcatcgcttcgtgtcgaccaacacccgacgaagccaatttaaaatcgaccgagtcgggaccaactacaagcagtggcgtgggggctcgcacaagaccggtctaggtggtaagtgatcccgaccctaacacgcatcgaactatgcggctgacagcatgtatgaaacggcgcgtctagacatctgggacatgatcaaagtacccgtcgccgtggtctttggcggtgcagtttacagcctgatccgacttttcaaaggaggtttgtgcaaactcgtgtcgtttgcgtggagcaaaggttgataagcggtcctcacgatcagaggaatggaacatcctgccccagatctttgcaaacatggagttggccggacctgatgcgcgcaacccaccgccttcattgatcgactttgccaagtcgacttttggtacgtccgggacattcagacacgccgaacatgaagctgagatagcttcattgttgcagtccttcctcgtgccagtaatgggggataccttccgtactggctagcattcgtcgccgttgtgtcggtctacaataccatccaggctttcgttacgcctaccctgaccaagcgaatctacagccggaaacctgaagagggtaagtggcgcgagacggtaaatgacgaatggagagctggatttaatcgtgacaattatagtcaccggcattggaaggcgtactttcggagtctggacgcttctggccgcatgcattcggatctacgctgcgtacgagatcaataaccctgcgtgagtttagtacagatgcctgatcaactccagagtgttgacatcgcacgacgccaatttaggttgtacaacctcactctggcatcgtatgtgctagcaggagggcactttttgagcgaactcttcatcttcaaatcggccggtctacaagctccggcactcagcccagtcctggtggctagtgagttctgccctgtaaagtcatgtgcacgcagaactgactctctgacaacgtccagtcccgagcatgatctggctcgttacgcagaggcagcactacctttccgtctaaggcagaaggcctatgtaccatgtcgcaaagcttcgagtaacgagcatccgataactcctgctgagatttatgacacatatgatggatacgatcatgacctgcactggacgtaagatgacatgacgggtaaagacaacgtgacaacaaaagcgggaaaattgggtaaacaactacgtcaaggtgaaagaaacgatcaagtatagggtccgccgtcactgagcagccctccacgagccaggaatcccaacgtcgatcggcggtccgtcctcctcctcggcgcgatcccgatatcgctcgttatcgtgactcgatccttgctgcgacactggcgtcgtcgagcgatcggcggatgaccagaagaagaagagcagcatgatggaattcaatatcggtaccgattgagagaaaggtcgtaaacgggcgggtatagcatccggagcgggtgaagggggtcgaggagcagtagcggaagtgtgggacggatgtggtggcgatgatgatcgcgagagtacaggttgaccatgtccaaaagccggcatgcgactggtcgccgtcgaattcgatcgagaaaacgtcggccgccatgctgctggaaagagtgccgagtcgtcctcgtccccgtcctcgactttctgctcggcctcggttcccgtgatcaagttttccacgcgtgcaatctcttcccgttcatctcgaaccggtctttgtaacgtttcttcgtcgtatatatggtatgatggcgtcgtttgtatattgtttatggtagttgtatcgatagtaacaggctcaggcgagaaagaggaatcggagatagaggcgatgcgagggtctgacgatcgaggtccgggggtgatggattggggtggggtggaccgttcgaccgtgggcgtcgtgggtattcactagggacaccgaagggtcattagtaaggatcctaccaatttcgttgtcgttgctgccatattatccggtcactcactagggcgtccatctcgctgaccaaagtctccaactcggcctgactctccttgagcttggcgttggcctcgtcgagcttcttttcgagctcgtccttttcctcttgagaccgggccaaagcacgctcaaagtgttcagccttgacatcggtcgttcggagcctgtgaaattgaagaggagaggacgatgatgacgaaatcgatcagcctagacgtctcgtttcctgcccgatgacgaaagctctgataccgacttttcgtgagtctccttcaactccctctcggtcctctcgagctcttcctcgagcatggccacctttctgctcaagttctctccggtagtcttgtgagtctctccctcgtccgccctcgacttgtaggaatccaaacgggtctcggtctcgtcaaggttggtctgggcgacatcgagctgacgcttgagcgaggtgatttcctgttcttgctggaggatggtttgcttgtactacgtgttggtaatatgagaatagcatgggcagacacagattcatcgtcaggtgacgttctcaaggatggacaagtacgtgagcaatcgggaactcacgttcttgttggcctcttcagcctcgtcggcacgcttctctgcaacatcaaccttggcgctgagctggctgactttctgcagacagacgagcgtacagtcatcagactaccatcacatgctgtcatttgccgcaccgttaccagctcacctccttgattcggtcctatgaggcacaagataacgatcggatcagagttgcacggaaggggtcgtgctcatagccaaggtctcaccatttttgacaagcttgtagttgaacgcggttgtggttttctagattagtacgtcttccaattacttggctagagattgtgagtattgtcaggagaaaggtggcaaatgaggtctttgtctatctccctatgtctataaagtgtttactgaattactgtacttgctgcgctgtacgtgctgtacagctcatcacaacacgtatcctagagagagcatcgcgtgggaagcgccaatgaaggcgacgcgtatctacaagggccagcccagccgagccatggctgccccctggctgagcatacaaataccgctcgacctcgtcatcacacatcgctcactcaaaccaccgcgaggttctcctcttctttttcttcaagttattacgtcctttttatatcttcgtccagcttgcacaacacatcgaacagggaggcgagatcaggacattaaagaaagaccggatcaacgcttcgggctgcgaaattggaaccgaggaatggggatgggtcgactatcccgcactgggctcaatgggttcgaacgggtcgcaggtggaggacgacttttgtcggccttgtaatatcctccccgctcggaccctgccttgcgaatctgccactcttctccagacctcgaattttccctttccactcccgtcccgttcctggtctctcgtcctagtcgagccgtcccgcgtttccaccacatctgggtgataaactagaggacccgatcgaccgtcgacttttttagcagagttgggccttggctaatcatgctctcgcactctatgatgtgcgagggcttttctcatttcgtgctggtcttactttgaaaagtcgacacaagactcattccttattgtactgtccatggcaatcaccttgcatgcaccatgatcatggcataattatcgaacgtttccttgaattgcgactcggccagatctactcgtagctcgtagatgtgctcccgcgcgcgtcctgatatgtgacgaagctcgcctcgcacccacccaacaccaacaacctgcaacctgacaacctgaccagaatcgtgcaacttcgaatagctaacgtgccactaattagctgcttcatccggtctactcttagtcctgcctaccattaaatctatatcgctccatcgtctgcgaattgtctcacgaaacatacagccgtccgccagtaccacctcgatcagagcaggaatatatctctctcgttcagaacccacagaacgtacaccctctcaactttactttccgtcgacgttccctgctttagagctgcaaggaagtttcgcccgaggtcttaaactctgagcaatgtcagtatacccgtctgaacggtccttcttacccgtcaccgtggctgaacacgttcctggtgtctctctctacctcgaccgtccgtcgtactgcgttattcacggctcgtaccgaacgaaccgaccgactcgccctcgccgattctaccacgctcctcgaatcattctccactcttctcggcttacgtatgtcgttcgttcgaatccgagtaggaattatattcagctggaaaagctgggagagggcacgtatgcgacggtctacaaggtgagatcctggtcctttcgtgtggaaaccatgaggacaaatatgcccaagattcgaaagattcgaatccaccgctgacactcccactcatcgcatgatctacttcttggtctgctttttctttgctccctatcttggtctgaattggacgtccgcagggccgatcgcggacgacccaggagatcgtcgcgctcaaagagattcacctggacgcagaggaaggcacacccagtacggccatcagggagatcagcttgatgaaaggtgagcaacctcaccggtccgcccttgtgctcgtgtgaaaggtcacggaaaggccagacgaggctgatccgacccggctttctagagttgaagcacccgaacattgtcaggctgcatgatgtgatacataccgagaccaagttgatcctcatcttcgaggtgtgtgtttgcgcttgctccaatcttcctcgacccgagttcgacgctgatggaaatgccacgcgacggttgtagtactgcgagcacgacctgaagcggcacatggatctgcatggggatcgaggcgcgctggacttgcaggtcgtcaagagtttcatgcaccagctcctcaaggtaggtggtctacttccctggatcggcgagacattgtggctttggtcgcttacatcgaatgatcttattgtcttctcatacagggaattgcattctgccatgacaaccgagtcttgcatcgagacctgaaacctcagaatttgctaatcaacaagcgtggagagctcaagattggtgatttcggactggccagggcgtttggtgtgccagtcaacacgttcagtaacgaggtgggttgagcgatacgtcagtacaagctcgacgacgctgacaaaagatggctcttccaggtcgtcacgctgtggtaccgagcgcccgacgtcttgctcggatcgagaacctatagcaccagcatcgacttgtggagcgcgggttgcatgtcagtcatccctgaccgctcgtcaacttgagcctcgaactcacattttactcgatgtccagctttgccgaaatgatctctggagtgcccatcttccgaggtcgggacaacaatgaccagctgaatcagattatccgggtcttgggaacgcccgacgaccgaacgatgaggaagatcatgcaggattcagtgagcggccgtgaaccccattcaatcacatgcttcgcttgacttactctgattttcgcttgcagcctgaagtccaggctcgagcgttgcatcgatacccccgtcaagatcttcgtgaactcatccctcgggctcccaaagaagcgattgatctgctggaaggactgttggaattcgagccatctcagcgtttgacggctcatgaagctttgcgtcacccttacttcttgtccaacaccgccagtcccggattgagcagtaacggggccgcatccgcacaacaacagcagcaagccaccatgctgcatcaacaggccattgccaggcaacagcaggaacaggtaagcaagccgatttgcgaaggaggaggggcggtttgtttcgcattctcggttggctcactggcgggactacattcacgtccaggcgattcgtgctcagatgcaacagcagacggtgcagcagcagcagtatcagcaacagcaacaggcgacgtcccagcagtgtgagttggttgtcttgtggtgatgaacctcgacgtagggggtctaattctcgccccgttcgcctattttagcgcaacatcaacagcgtcttctgcagcaacaccaacaacagcatatcaatgagctcgccgtacagcaacaggcggcggcccgacagcagcaagcttattacggacaacaacagcaacaacaacaacagcagcagcagcagcagcaacccccttcgggttattgaatacccctcttttgcggctaacgatcgaaatggaaacgaaagataacggctctattgtgttgtatcagtgtacgctcctcatgattagcgatagacgtcttcgttcgacgaacaattgatggacgttcaatatggtctcgaggtcgaaaccgcgaggctcacaacctccactccgagtccttgtggtcgcatgagcccgttccatctgtccaccacttgccagccagtcaatccccgaagggacgcgtcgctgacgtccccctcgatgtcttcctcgtcagggagaatcagtctagtcggtggccaaacgacgaaacgctccaaggctggcagaatttgtcgccagttcgcctttttcaatgtctcagtcatgctctggacggtccggtgtgtacccacacaccaggatgaaggttccacctgatgctccggaaacgcccacggcccgtccaatgcgctacatcccattcggatggttcgcagtctcgtatgagcccagtcgggcatgacccgtgccagcaagccgaaagaatgcgcatcgtggagcgtcaactcttccaggttgggacagagcgagatcagccgcagaagaataggtggcgcatctttcgggggtcgcgcgtcaacgtgtttgtccgacagcgtttgttctgtccacgaatatttgatctccaggtgcgtccatttggcgccatgtatctcgaggaaatgttccagcgacttgcgatcccagcttgagatccgtagatggcgcaagttcggcagatgacaacgtaacagcacgtcgaagagcacgttgtggtttgctaccattggcgtataaagaatccgtagatgcgaaaaaagattgccttgagaattctctagtagccgctcgacaacaccttcgcacgatggagcgtggcttggtaaccaggtcggaccagtggttaatttctcgataagctcgagtccgcaaaagaacggcaggacctcagctccggatgagaatcccgtggcgtacccgtgcagcaccttcaaagacttggtgtgccactcgaagagcctctgcagtatcgattgaggcaagaccgaaagctgaggagctttacaggtgaacgaagataagtcttgagtgatgcgaagaagatgggagacgtcactaatcaatagccccttttcgatgtcgggcgaggcgatgaaagggaatcccagcgagatggctcgtgtcgttcgagcaatacgctctgtcaatgaaagtccttcttggcttcgggtcaagtcgcacagctttctagtctgagtgcccgacctcaagaacatatgctcatataggagtttattggcatgatgctaccgcacgacggagcgcgcgggggttagagtccagggcgctccttaacgatgatatcccggcaacttacttccgttgccttggagactcgggctagtcttgcaagacccgtaatcctgacagaccagctttctgcactaccgtctggtaaactggcgacctcgtcaatgatcagattccatatgtctggcggcaggtcaagcataacgaaagtcatcggagcgtccgaaatgagcgtccgacatggtttcgtggtcggcaatccggactgaggttgcgcagatgcacttatagcagccttcaaaatctcctttgtactttcctcgcatatatttggccagaaagggaagacaggtcaaaggtgtttgatcacgacatgaaacatgtcctgcatgtcctgtcgcctttctttggtcacgtgaaaatggcagactcgctcgaactcggtcaaccccgagctcgatcaccgcatccatattggggaaacctaaagggggagtgagcacaataaccataccacaacatttgtcaagtccagtggcaccatagataggacaagcgtaaaacgatcaaacagctcgagagaggattatcactgtgatttaggcgtgcagtgacaattatgggtttcgtgggcgatctggccgcgatcgggatggccgtcgggttagtcaccataagcaattcataagcactgcagagtcttaccaggagtttgttggaacaggcctccattgatctacatcgatcaagctcgacagatcatcaaggccaggtatgtatgagagacctactgaaggccgggctgctcactaacaactcgccgcatcggcctaacagagattcatctggtttctctatcggtcagttccggacacgagcgtacttggtagactacgcgaactgacgcagtctgcgatctgacagacatttgtgccgtcgtgatcatcgccaacattacaagatgcttcttttaccttgggcatcggttcgagacctgtaagtatattcgacggaatttcacccgtagcgttcctgatcgaggactcttcactttaccagcactcatcgtgcaatcgatactgctcattacctctcaactgtttctcctctccctgtgtatccacaatcgaccgtcaagatcgtcacaagagagaacaggcacgatggagcagtcgttcgccagtagaatgttcaaagaaaggcctttcaacttctggcagtgggacaggcttgggacgtatctcgaattcttggctggatttatcgtttttatggtgatcgtgcactttgccctcggatggagctcatccgttgtcgaaaggtcagtctgaacgcatcccgaatgacagggcccagtatcgctgacgtttaagtcacctcgtagtctcggattgatagctcttggactcgagtcgaccttgcctatcccacaactattgtccaatttccgcagacgatccacggaaggattcagcgacctcgtgctggcggggtacgtgtttcgttaacacgagtgtaaagtggctttgactgactctcaatcactcatcctttgcagatggctcggtggagatattttcaagactggtttctatcttctccgacattcgcccatgcagttcacaatatgcggagcgattaccgtggtgctggatttgtgtaagcattcagcctaccacttaccgcttgcgattttccgctgagattcagactgcaggtgttttggcgcaacgcctgatctaccgagaccgagcgcctcagactctacccgaagaccagcagaggatgggtggctttggagatgaggaggatcagcacgtgctgcacgaatcttatggggacgcagacctggaacaaagctctcctcagcgtcctgcttgaatcacctcgcgagattcggcacagtatgcttcatttgtaacgaccagctcagtcacgacgacctgaaacgactatacatgcggttctaaaagaaaggcgtttgggcacaatgcagtaatacaacgagaacgaaaataaaagtcagaattataactcgaagcgtgcgttcaatccaccggcatatcttccagtcttgtcgccagggcttgccacagtagggcaacacctttattcgcgcgcgtcttctcctctgcgaatttgcgccagcccagagtcgcttgtgcggcctgcctcgagtgtagcacgaccgacagctcgtgccacaggcactgcttgatgtggactcggcgcgtcatcagggcctcgatcgccgcgttatcttgtgcgatggcgctcgaaagcttctcctcttcgacctcccagttgatcttgcgcttgtcacgcacgccgtcgagcttcttctgcttggcgtcgaccgacttgcgtaaaaagtccgagttgtcctttgagagccctgttgacggcagagtcgtccatgttagcgagagatccgcgcaaacgcaagcctgggcgactcacgatcgtgcctgagcaacaattctttgaacgcagcgtaaaggtccctctgcgttttcagcgactcgatggtcccgagtatcaaagccatcgtccgtctctctgcgtcctctgcttctcgtccccacgcgtcacccacagcggcaagaccgcggccgacccccttgcaaaggtcgcaccctgctcccccgatgccaccgggattggcactcgaatctgcgtttcgccaacaagactgaggacacgcttcgctcagcgtcgcgagtgtcattgccatccgagactggtctgccgaattggcttcgaccctcctgacgctcttttctgccaacacgaccagccgggcgtgagagtcgagcaggatcgggagctgctttcgcatcgtctcgatcctctgcgtcacatctggaggaatacttgactctgcgttcgagtcgggtttcttttgcgtagactcttcgtcgaggttgaccttgctgcgcttcctccatccttcgaaattgggttcggcgagaaaaacccctagacaaccgtcttccttcaagatcggatggttgacgacgaaattgatgaaacgttgcaagcccttgcgacgttgctccaagaacgcttgatccgggctcatccgtttggggggtagagaaggaagcattcggaatggctgtattgcaacattcaggatcccacgtttgcttcacgtttgactcaggtctgacttacatatcgtttcgtcaaacagtcgagaagccagacgaaatccgaatacctccgcgtgaccgtcccgtgtgtacgtttctatgtatggcaaggatttaccggtaatctatcagagctgcagcgctacctagtcgaccaccaccatacctctgtacttacatcgctttccaacctgtatttctggagaaaccatccttccttttccgacatcatcgtcacctggaccgtttcgatctccttccaccatcctcgactggattcgatctgtcgatcgaacccggcgtcctgttcgatcgggtcgacctcgtgaccccgggtctcgctctcgacgttttccatggtcgctggcagaccggctttgagcggaccgacgtcccaaggagaatcggccgagccgttcgttgccgggtctttgaaagcgttaccggtcggcgtggcgagcgctccgaacccgttggaagatgtctgtgaataagctcggatcggggtgggatgttgtaacggtcgggaagaggccgatggggtgccggtgattcctgaggacatcctcaacgaagggatcggcaagtccgatggagaggtctgattcagcctttgtagggaaacgtccttgcccccctgagcaagagcgacgagcccgagggcggcaaagaattgttcttgattcaccgactgagccgtcgagggcaagaggagggtgatgatccgttcgttcatcgatgcgggcagccccgaggtggacaggagacgattcagcgcggctagggagacgagcccagatccatccgtatccaatgaatcccagtacatgacgtattggttcggcagactggtttcggctgtaaacatcgacagcgagtcagttcgaccaagcgtcggcgcaacgatcccgtatgccagaaaagccttctggaactcacagagcatgttcatcccactagccaacaccgcgggcttgtccatcgaggcgaaccctgctgaaccacctcctggtgagatcatccctccactcgcggcgaacccgctcggcatcctgttcatcatggcctgtacgggtcgttcgtaagaacccaggttgggcgtcgaggcggccagaggaggagcgccgttactgctaggatttccgttggtattggaagcggtgggaggtgctggagtcgcgctggggctagggacgcctgaccaagggtcgacatcgggcatgtacgaggcggtggaggaagcgagtgggtcaaagtcggacgaggtgaacgtcgactggaacgccgtcggccgattccggggtgcgttactacggagaatcgaatgcgagtcgtgtagataaggtcagcaagtcagatcctcgttggtgatcgatgggatcataatgtgtagctcacaacatgttgactcggcttgggaccgcagtcgctttacgagcctcgatgtgggctagtgatggcgggagtgttgatgcggcggggctgagcgggttgaccacgagcgatggatgttggttctggattgtccaggactgatctagatccggtattctttcttgagctgtctagatcacttgtcgagtgttgcatgacatgcctcctatcatctgtcgtccttctggatctagctactctagctactctctgatgttcgttgagcgatcaaatgacgatagcgggcgggcaatctcggcagggtagggtggggggaggcaggggcctaacccctaacccctaacccctaaccctaccgttgaacgcatcgtacgtcaagtccctcgacgcaattcgcaagtctgggtatctttttcgcatgtacgtcaacgtcggccgctatacaactatatcacatcgaacgcaatctagtccgactcaaaccggcggggtatacaccgacttggtctcccgtcgacccctctcgagtccagcctgttccgtttcgatgaccgtcctcgtgtccggcatgaaatccctcgcaatctctctttctgccagctggttcaagggctgaccgcatgcacacaaatcgcactcgagctcggtcggtggatgcgattcgagcatggactcggcgtaagttgggagggccaggatacctgccgtgcagcagcactgaaggcgagcagggtcagtcgatggtctggattgacggcgccgagacggccgatcgcgacttaccgacatgataagcgtgctctgcagcgtagtgaattttcgcatatgccccggaccattcttgggcaacttggttccatgcgcatcctcgccccagatcgagaaaaacacctgcaggctaaattcgtgggcgacccgaatcggcgtgatggttctgtacggtccgacgtcgttagcaatgactttgctcgataacccttagcgacagactcaccctgggcatgtcgatggacgcaacctgttctcgtctggcatcctgacggtctcattgatctccagttgttcggcgggcggctcggttgcatccggacgaggcacaagctgaccttcccataatggatccttgcttctatcccccttgttcggtcgatgcgtcgagctaccgcgattgcttggcaatacgtaccggtcctcttggttcctcgggagcgacccgaccttgaatagcaagatatcactggcggggaacacggtttcttcctcctcgggcctcctcggcgactttatggcaaacgtctgattgatcgacagcctgacgctccagattgtcgcacccgggtcgaggtccttgatgacgcaccaaaagtttgctaatccgccgacgcacacggcgttgctcgccaatccccaatccatcaggccgaggcccggtgcaaacgtccgtcgccgtacgttgagtgacaaggctcccttgtcctgcgtagcgagcggaatgatccacatttccttcgacgtcgtcaagtcgccctcgaggtagggcaaattggcagtcggccccggcgacggttcgtctgtagagaacgccggcggatccccttcgtaaggccctggcgaggcgttgtactgaaaggaatgagtcgacgttgttgccgatggtctaggcgaaatgtctgatcgcctagatacctcacgtcgaggggcgggcaggggtggactaccgaccggtcccgaccggcccctcggactcccagtctccatcgacgttgggctcgagctccttgccggcgtggtgctacctgagaagaaccctgaaggcgacggtgaccttgtgcgcagtgctgaaaagaacgatcctagtcgagacacggcaggggcctgcccaaacagcgtcgcttggacacgatgcgacacccgtccgtacggggtgcgatccagtccaggtagagtgcaaggcagcacgaatgtgtactcgaagctgtgcgtcatgtcgacagatgagacgagtggtcggcatgtcggttcagttatgttcgagtgcgcctgccatggtgctcatctcacaattgctgtcctgcctcgagctgcagcccatcgtcccccggcccgtccatttccagcgttcgctcgtaaatcacgtcgtcttcccatcgacgtcctggggccagcatacgagtaagaatattttcccaaccatgtatgccccgcctgttactcacctggaaacgccagggtagcctcggcgacaaacctcactctcaacctcctcgccctgcacggcttgctcatgtgaacgacgacgaacccggtcattattaaatccttcctgatcgagtccggttcactgggcggttcgatatagtgattgaagtcggacgtcctgacgacggtgatggtatctggcgaggtctcaaagtcgagcacccttcctgttggtttgggcagtggaaagagacagagcgaattattgacgaccaggttggccgaatagaggctggccatcttggctaggtcgacggatctatccgccgatcacctcgccgtaccagatgcgggattcggtcgccagttccttctacttattcagacgactattcaaccagtccggagtggtgcagacgaccacattgacctgcgagttgcgacttgacgcagtctcttgtcgtcttggtgacttttcgttcgcgagctcgaatgacggacttggccggagcggaaaacatcgagtcaacgccttcacacactgatcgaatactatctcgtcgacatctcgtcaaaacacattactgctgtcggctaatcaacccaggtatgaaccgctactggacagaggacttggatatctgatggctactagtcatgctatataccgacgtgcgtatcctatggtagacgggaggatcaacccgcgcaaagacaggcacaacaagcctgaacccagcgactggatgtgcgtccgtttcgattctcgaccaatggatcatttaccggttattgtggacactagctagggaatcagaagactagtagacaccgggaacccaacaacccaacatgtcgagtcgcgcacagcgacagacgttcgatctggcgtggacgaagcggctcgcaatgaccattcatccgaacgactcgatacggctgatccgagggaatggtcgaacgtgttcgacctacttcgacccatgtggcgacggtatagcagcaacttgcatctggacggggacttggaaacaccgcatatcccgtagattgtcactagcatgactttccgggtgatctaaatttggcacttcgacttggtccagatacacgtttctacgggtcctatgtcgactctcaccactcaaaacagctggttggacgtcaaccacaacgcacgtttctcgaacctcgtcgaatcgtcctcgatttagaacagtgcgagacttcgccatccggtagcatatacgacttgccccggggccggtcgcacgacagggaccttttggccatttttagaacgacgggcatattcaaagaaaaggcaaaagaggcacgcgcgagtcaacccccgatggtccatgtcgcgaaagaaccaccgaccacccacgggcggacgattgccctgtcccctcccctccggttgcagatctttgctgcccggaacgaacgctatccggagcaccaaaaggcacaggcatacagacgaacgcctttgccaagcacgttcgcaaacgtttcaaaccggtggattcggtagaatcccgtctgaatcgttgcgacgagttgcggctttttttcccgcccttcatgcgatggtgatggactcgtagtattaaaggttgggcagcgttcgtgggttcaaagccgttcgcccaggccaagtcatgtctgcatccacccaagcaagtcgatcaccgccaaccattgttcgtcgccatggtccttgatcaatacacctacatcttcgccatcggcacctttttcgcgctcctggacgcgttcaacaacggagccagtaagtagaccgcttcatcgtcgccccgttcccccttctcacctctacccctccacgcccttgcagacgatgtcgccaactcgtgggccacctcggtctcgagtcgatcggtctcgtaccgtcaggccatggtgctcggtaccatctttgagatgctaggcgcgatcacggtcggcgccaggaccgccgataccattaagaacggtatcattcccaactcggctttccgaggagatgccggagtccagatgctcgcctttagtgagtggatgagcgccagaaacgtcgacgccgtccaaacctctgacatccaacttgccatgcccaatcacagcctgcgccctcgccgctgccagttcttgggtcatgtggtgcactcgtcacagtgcccacgtttcgtccacctactcgctcgtatccgccgtggccggtgtcggtgtcgctactgtcggtgcttctcaagtccaatggggatggaaccatggaaagggactcggtgccatctacgccggactcggtatggctcctaccatctcggcctgtttcggtgccatcatctttaccctcatcaaagtcatcgtacacatgcgcaaggatcccgttccctgggccgtctacacgtcgcccttcttcttcctcctggccggtaccctgtgtactctttcgatcgtgtacaagggttcgcccagtctcggattgagcaagaagcccaagtggtggatcgcctcggtcgtcatgggcaccggtgccggtctcgcgctcctctcagccatctttttcgtccccttcctccacgccaagattgtcaagaaagactacaccctcaaatggtggatgttcttgtacggtcccctcttgttcagccgccctgctcctcccgatgctggcaagtcgatcgtccccaactacgccgtcgttcaggatgacgaggacgaagatgaaaagtcgcgcgccaacctgcccgtcgtcaacgaggtgccatcggtcagcgagacccgacagaacagcgaggaacgtgatatcaaggacgccttgtacactgcccctgccgctcccgaaagcgaagccgctcgaccgacctacaacgaactcatgctcgccggcgaggaacgtcttcacgccaagttgagggccaagtcgggtcccatcggttgggccatgcgaaccttgcacgagaaccagatgggtcccggcgccatctacgagttgcacaacctgcgcatcatcgccaagcgtcttcccgcacagatcgtttgtggattgctctacggaatgcactacgacattcacgccgcacagaccggtatcgccggaacccccgaaggtgcccgtatggagcgcgtctatgcccacgccgaaaagtactcgaacgaggtcgagcacacctactccttcatccaggtcttgaccgcgtgcaccgcgtcctttgcccacggtgccaacgatatcggaaactcggtcggaccttgggccgtcatctactcagcttggcataccggcaacgccaccaaggccaaggctgccgttcccgtttggcaactcgccgtcttgtccgccacgatctcgttgggcttgatcacctacggttacaacatcatgaagggtgagtgtcagatcgtcgccgtctcgaagttgccggatcgatgctaaccatcctctcttcatccgcagtcatgggtaacaagatcacgtatcactctcctagtcgaggatcctcgatggagatgggcgctgccttgaccgtcctcgtcttctcgcaatactcgctgcccgtatcgacctcgatgtgcattaccggtgccactgtcggtgtcggtctatgcaacggaacgctgaaagccgtcaacttccaccgagtcgggctcttggggctcgcttggatcatgactattcccatcgccggtctcttgggtggattgttgatgggcatcatcctcaacgctcctcacttttcctcctagtccgcagcgatcgggtgtaccatatagaatagacgggaagatccgcacgctgtgaccatgacctataatgaccatactctatacattccgagaagtcgttttaggcagacgtcggaagcgcatttatgtttgaacatgaccacgagatcacgctcacacttatgcgattcgtgtgtgtccagactatgcgtgattggacttgaggcgtatccaaaggcattctcttcctgctctcaaagatcgattctccaaggcagtttctatagtctatgcgtgtggaccgaagaccggacctcgtctgcagtcaatcacgtctctacacagatgacttggaggtctacccctttattcgcggtcgagacagagctgcgaacttgctcggagcctttctcacccgaatgttcccgcgcatcgcctccggcatgatatcgtgaggatggtgatcgccgacacgtatgaccagtgagcttcgttaacggtcatccgaccgtacacgggatgtaaggcgacccaggaatagtcggctcacagcacgcagttcaatgtcgaccgagtcggggaggagtggacgtgacctgtcgatatgcaccgcgtcgctagaaataacgctgaagagtcttgctatttctgggtttcactgccggtgcaccttgatgtcataatcgaccgaaatatcacagagtgacatgacacaacgcccgtgcgcacctcgatcatgtagtacacgtaactaggctgcggaaagcggctgtgtggggatgatcgtgcgtataaagacctggggctgttcaagacatggataccatttcgatcgtgtcgttgcaactaagatccactcagccactcaccacaaacacgcgcgctcacgatcgatatcacactgacaaaaatgggcttcttccaccacgacgacaccaacgagcgacaggcgtacgagcaagtagaccgagaaggttccacctgtgagcagaccatggtattgaacttggagtcgtagaagtgagacgctaaaccgagtccaactccctcgactcaagctcacgagctcgtcgccggggctgccagcttcatggctatgagggcttatgagcagaagcaggagcgagagggaaagcccgaaaggtcggtcattgtcgtgccgacaagtgtcaccatctgagactaacgccggcctggaccattcagctgggaaaccgccaaggagatcattgcggcgattgcaggagctgaaggtgagtcgaccagctttgatctcttggatcgacgctgatgcgactcggtgattcttctccctggcggtatcgtagccgacaagcttatcgagaccaagtgagtccatgatcttcgtttgacaagaccgacagccgctcacgataccgtgctattttactcaccgacagaggtctcgaccaagtcgaccgatatgaagccaggcgacatgccgaggagaacgcaaagagggctttagctaggagtggacagtacggacagatcgactattgatctactgattgttatcgaaatcggtctgattccgttgcgaatggcaatgtgaaccactgagagacggtaaagttgtgtcaattcaaatcaaccatatcgaaatttgtattctcttcacgtcgaaggtgtatacaatgatgaactcacttgactactgatcgtgaggatcgcaggccatgatatcaagtctcgctcgaaggtccccttcacagcgatgcgtgatccctctcaccccgcatgcgagtgcgaggagtatgaatggacgagtcgttcagagtccagagtcgattccgacattcctccaggcaagatcgtcatgtcattcgatgcagtgtgtcgtggcggagcagacttgacaatttggttgtggtcagtgagattcatgccttccagcatcacttcggtcacctgacgtgcacggaaaaccgaacagacagcgggtctatccaggagcccttcttgtgcgtcaagtcctcgaagtgagcattgaaagttgaaaaattgccaatcctcgtggtaactggataactcagcagccgagggcggggatgcatctgtctttgggagtaagaaagccctttgaacggcatgcaaccctgttgagccttcctgtcgctctagcacgaggtgcccaaaataatcggttgtccggatcgcacatttaccgtcactcgagactttggcaggggagcatgcagctgtgagcccgagagcatgacccgggcctccgctgtcatctacgagtaggcacggtgtacctctcaaactctgtccaacagggcaaaacctagacgggagggcgggagtgtgtcggcgttgggttgtgggttagttccgatttgacgggtgcaaactttgtggcaagttcgagcgcaagttcgtgccatcgaaccggccgggacattctttttctcggggctttcgatcgccgggttgtcgtgatgagggtcaatgggtcctgagagatctgaaagaaatgtacgctcgcagtcgtaccctcattcgtaggtttggaagaaccccctgatcttgaagacgtggaccatcgaacccgcttgaacatgctgtcccgcctctcatcgagcgtaggtcgtgcatggcttagccgctagtcgactataagagacggcaaagagtgtgtcgatggggatatcggaaagatggctgtgattcagatcaccgtatacgacttcctccgaagcactggttcatcgcaccatttcttcccccaatgaacttgttgtccgaccagacgactatgccggcatcgccttggcagcctacaacaaagcgctcgctgaaggcaaggaggatgcggtcgaaatcaataagcgtcttccaggaggcaacgttccgactggtacccctatcaaagactggcgtatagatcagattaccaagattgtggtctgaggaacgaaaaagctggtggggctcgctggtgtcccatcatccatctcggacaccgtgatcgacgctctcgcgaattccaccggcattgtcaaaaaggaagcttcagcaaaagacaagcgataataggaagatctcaaaggcaagatcggagatttgagacgaggccaggaaaggatcggaaacgagattaacaagtcgagacctttgaccaacctggacaaagtaagtgatcggaggttggcgattagcacgcgctgacatgcaaccgctgtaggcccttgcagatgtttatgatattggaacaagattggattttggcgcaacctcgttgccgatctgtaccgcaaagcgacaacgctcgtactgctccagctacagctgtcggacacatccccatcgctaaagaaagcgtgggagcgagagcgggcagacatccgccaaaaacgcatcgatgcccccaacaaggcatttaacaaggacatacccgacaggccggccttcacagtccttcagcagatcgtcaaggacactacggatgactaattcctacctctttacagtttccgtctggccaacggaaaatgtcttcacattgaagaacattggattccacagggcgaacatggatactaattataccgcctggctgaaaactacaacgacacgtcgcaacccgcatcacgatcttttgctctggcgtacaatgaggtagggtggtcaatgatggccagccgcctcgtcgctcgatggctcccgtgctaaaatctcgtttgatggacgtatctgaagtgcgacagcggaatgctgatcccgcgcgaaggcttggagtatgtggttcgcctcgacaccaacttgacttctaatgggctgaaatcaacccgtcttcccttagaaccgccgtcttcaagatgataccgctgaaagcagagcagggggaaatgggtcctcgagtccggttgatctggatatacccgaaagacaaggtccagcaagagtggaccgtcgaattggtgacgtcagagctcaggtattcgtcgctcggcgatgccgctcgggatactgacgatgcgatccgccgcatcgtcaattctgaaagcacgcaaagcttcgtctgcgcgctggcaaactctacctcctacatcttcgtcatggaccaagcatattcggacggaaagtattgttacaagaacacagtctggctccccggtgagcgcctgacattcggcgcatggggctcgggtatacgagcttgcttcgggttcgccatgtacaagctcgatcaacccacaaactcgaagagcgagctcgaacatgtcgtcaaggacatgtttggtctgcttccgaggtcgggaacgctggggcttcggagcgacaaggccaagttgcggagtttcttctacatccgagtcaaggaaccgaccgtctcggcgaagtctatgtctgtaactcagatgggtgtcgaagatttcaaccgtgatctcagagacctaaaggatcccattggtctctccaataccctagacaacacaaagtcgtaccctgacaaggaagtcaacttcaacttttcgcagatcaaggggaggatgagggtcgacggtggaaagcaaccgttctcctggtgcgaacttgttgacgcttgaataccttcagtatgctcagtcttcggcggattaaatatgtaggatatcaatgtgttgtggtttgtgcggaccatggtccacaaatgcgtaaccgttcacgtgatggtgtacttgattcgagtgtgtcgactgttcaatactgcccgtctcgctcactcaagtcttggcgatatatctgcatgcgccatcggacgaaagtttcgaagacatgattgtatcatgatcccatcatctgggaactgccctacatactgccagtgcgctagttgtgtcggctgatcctcgcggcgtccgtggccaacaattgaagctgttccatgtgcgagaatgctggatggctcgactcggcaatcgcaaaaggtcgttcaggcacagcggatgtgtgaatcatctaccgtcagcctaaataaaatctcctacggcgacaacatatggctgcctcagaaactagaagtttgtctccttatacaaagtagaaagatccgggtcgcaacctacaatcgacgatgttgggcgcggatgcaacgcagcacgagcttggaccctacatcgtgacttggatcggttcacgatatcctaacgtccagccgagagatgttacgaacgcggggggctatcagacttaattacgcgcaggaagcttcaatctgatcgatctggtccagagcacaattcaggccacggagatctcgctgcaggatttacaaagcacggctacaccagcgtattcgtcggtacaaacccgctgaaccagatatatctcgatcaagtcagacgttagataattcagcccatccgcacactcaaaggcaaaaatgggcgagtacaccaagttaagggcgaaggtggaggattttgccaaaggccagatgagtcttcaagacaaagttgtggatgagctgaagaacaagttcatcaagaagattgtgagtgagtggatctctggcttctcgtgacgtatcgaacacagctgatgatcaacaggcatagagcggaagaacgggctgaggtttttgaatccggtcgaagttcacaaatgacagcatatcttacagggacatgacgggcttcaggaagatcacagtggaaggcatcgatcaagccggtgcgtcgcggtcctactagcctgatggtctgactaaagaaagcccgaatgggtgtagtctagttagactctacttgtgtggggcatcgggtcgacattgcctctcgtagtacagcgtatattgctgtggagacgacgccaggccacggccggattgatcgcgatgttcctttatactgccaactggacacgtgtggggtgtaagattctgacctagaactcatgggccaggagacaaggtccgataaccccgctaccgtagtctcatgtgcttctcgatcggtacgcaagcccgacggggttgtgacacaaatacgatttcgcctacatgtcgtgtctgaaacatttatgttattctttaagtcatggagccgtgctctcttccgcacatcaaacgcgggtcgcttcgtctcactgtcggctggcccacctctgagaatgatagattcacgtcgagtgaacggaaatatagccgggcgccgctcttcgctcgccctcaatcgatcgaacgtgtcgcccagtgcttttgacagattgaggccgcctgcccaacgtcatcccgtacggagctgtaccagacgtcaagtgactcgccgcaatcgcacgttccccaacaagatcttaagaaggcgggtccttattcgctccacacacctcggtgattgagggcggtgtgagtttcagctttcacacagattccccatctatcatcaacccatccattccatcaatcagcgtttcgatgccgccgatgacgcgccgagatcatgatcgacgtcaagtctcggctctgcgttaaccggtcgtcacgccgttcgattggatctttccgtccgtgcctcgtcttgacgtccgttgcgcgcgcaacgaggtggatccgttcggcatctcattatcattgtcgggcgtcggcgagattccggatccaacctttccatacgatcatgcgatcaatcaatcaaaagtgttctcgtgtgatgatcaccgcagatccacttggtctacagcaacgatcctttggtgtctttgtcaatgaaattccaaaagtcgtatatcgcacgatctctggtcaccaaggtcgtttcagctgggtcatcctgctgcaaggtgcccggaacttgatgcggtcaagcacgttcgaccggttccccccgcagtcgcgtcgcggcaaacgagagcgagagaagtctgtttccgggaaacgattgtcgcgtttcttggcatttgaaccgagttggagcaggcggcgagggacgggcgaaggacatgatatcgccaaggccaagagtggatcgcagtccccccaacaaaccgacaatcattagcagacaatctcccgccgccggccccttgagacgacgatgacggcgctgcctgcgttgcccgaccgaaccggaattttcactcgactcgacgagcacgcccccatgggtggccacgacttgcttataggtcgccgactgcattttcgcacaatcaagatcgtcgactttgcccaatcctcgatcaaaactttgtccatagtcgataacaaccaagatcgtacccccgcatcgtcgtcttcccacctcccgccctcgcaccctctcctccctctggactctcaaccgtcctggaaccgccctatgctgaagtctgctactttcgtctccaacaccaccaccatcaccgtctcgactcgaaagatcggaacgaccttcattccaaccgaataacattagatgcaagcacccgtgcaagcgcccggggcgcctcacccagaggcagccgccaaggtcagtccgaggcttgtcttgacgggtttcgtcggtacgcgcaaccccatgctgacgttttgacgtatgctgcgcattctcttatctttctgcaggccaacgatggcccccaatctacctcgccgcaaggtccgctcaaagcgcctgcgcacacattaacttcggacgttgtcatcgaagccttcgacacggacgtcgataacggtcttaccgaagaccaagcccgtcaagcgcttgacaagtatggcccgaacaagctcaaggagatccctcctccttcgttctggtcgattctcgtccgcaacacgttgaacgccatgaccctcgtcttgatcgccgccatggccgtctcgtttggtacccaggatttcatctcgggtggtgtcatcgccgccctggttgtcatcaacgtcggagttgggaccatcaacgagtaccaagccgaaaagacggtcgctgcgctcgaggccatcggtgcgcccactgccgtcgtcatgcgccgcaaatcggccggcgcccctggtgagatccaaaccatcaagaccgacctggtcgtccccggagacgttctcatgatcaagatcggtgacattgtccccgccgattgccgtatcgtctctggtcaacttgccggactcgaatgtgacgaggccctgttgaccggagagtccttgcccagcgtcaagaccgaggaaccgatcgacgacccggtctgtcccgtcggtgaccgaacttgcatgatctactcgggttcccaagctgccaagggtcgagccaagaccatttgtgtggccaccgggatggacaccgagttgggcaagatctcggccgccttgtcgcgtaaagagaccaacaagcgtaccggattcgccgccacttggtacaagttcaaggcgtttctcggattggtcgagacgaccccattgcagatcaaactgaacatgctcgcctacgtcgtcctgttctttgcctgtatcgtcgccgtcattgtcgtcgcctcaaccgggttcaaggacgtacccttgtccatcgccacttatgccgtcgccgcagccgtctcgctgttgcccgccagtctgcccgctgttatcgctctctcgctgtcgaccgcctcgaaacgtctcgccgactcgaacgctctcgttcgaaggatggacgccatcgagaccttggccgccgtcaccgacgtatgctccgacaagaccgggactatcaccctaggaaaaatggtcacccgtcgtgtctgggttcccgctgggatcaacggatcgggtcgatctgccgaatactcgtccgacctcgacaatggccagtactttaccgtcgacagctcatccgaccctttccatccccgaggtcacatccgtactgaccctatgggggacaagcccgccacctcgtccaaggccatggccgaccacccgacccgttcggatgattcggacgactctgacgaacagaccctcggcgacggcccggcctgtgaccccaacgatgttcctgaacctctacacgagttgaccctctgtgccgctctctgtagctcggccacgatccagcgtatccgagacgaagagtccaaggaagaagacctcggttgggagggtcacggtgacgccaccgaggtcgccctccaggtgtacgcgcacaagctcggatacggtaaaccccacttgacctcgggaagcgcctcgggaacgtcttcgcccgtcgcccaggacgaggacctcgtgtactcgacccgaccggacaagtacgagttgctcgtcgagcacgctttcgattcgtccatcaagcgaatgtccatggcctacctctgcacccccggacctgcttcggatgtcaaggaaccctacgtcctcgtcctcatgaagggagcctttgagcgcgtctttgaccgatgcacccgtttactcgccgacgaccaaaagacccgcgagatcagctcgggcgataacgatgccattcagattcactacgaacgactcgcctcggacggtttgcgcgtgttgaccatgtgctcgaaacgtctcccggctagcgaggcctcgaccttgaaagagctcgctcgtgacgacttggagaccgacatgtcgttcctcggattagccggtatctacgatcctccccgtgtggagtccgccgtcgctgtccaagattgtcacaaggcgtccatcatccctcgaatgctcaccggtgatcatctcggaaccgccattgccattgcccagcaggtcgggatcttgaacaaggactttcccaagaccgccgttatgaccggacctcaattcgatgccctcagcgaggacgagatcgaccaattgaaccccttgcctagcgtcgtcgcccgttgcgcacccgagaccaaggtccgcatggtcgaggcgcttcatcgacgcaaccgtctctgtgtcatgaccggagacggtgtcaacgatgcgccttcgctcaaacgtgccgatgtcggtgtcgccatgggcaagaacggatcggacgtcgccaagcagtcggccgagatcgtgctatcggacgacaactttgccaccatcatcgtcgcgatccgcaaaggtcgcggaatttttttcaacctttcgaaattcatgctctacctcatgtcatgcaacatcgcccagatcgtcctcatgttgatcggtctcgctttcaaggacggcaacgatcgaagcacctttcccatctctcctgtggccattttatggatcaacacgctctgcgcgggaccgcccgccctcgcgctcggtctcgaagagacaccatccgacgcgatggacaggacaccgtccgagtacaagagcatcttcgtagctggctggtgggcagatctcttcttctacgggctgctgcttggcaagattgctatcctcaatttcgttgtggtcatgtggggatacttcgacgggtacctcggaatcgactgcaacgaagacctccgagatgacatttgcaaccacactggtcgcgcccggggagccgtctttgccgtcttcctaatcgtgctcatcatccatgcctttgtgtgcaagcacccgactcgttcggtcttccgcatgaactggatcgagaacaaggcgctcttgtggtctgctgttgtgctcttgatcagcgtgttccccgtcatctacatcccggtcatcaacgacaaggtcttcttgctcttccccatcaaatgggaatggggcatggtctttgccagcacgctctacttcatcgccgtttccgaactctacaagttctttcgtcgccttatcgagcgaaagaaccagccgaaggtgcaggaccacgctcacggcgatgatgccttgagccaggagaagcgggtcaaggtcaacgaaaagctgaccggcaattcggtctaaacgaaagaggttgatcattattgctgtagttgcaagttccacatcgattgttagcccatgtacgatttggcattcatccgtttcatgattatacatgtgtttgtcatattcttccttcctttcgaggtgactcgcgtgaatttgcttccgctcaacgcccccaaacgttaacggaaacaaaagatggaacatcacatacggccttgtccacccttctctcttccctacagctacgtacgacggactgtatagctgagacaatgttcatcaggctactcatccctacaatggaatcgctcacatctcgatgaactcgaccggtcacatctcatacttttcacttttactcaccacaagaatacccagcaaaggaagcactacttgagggtggacgcaagtctggagcatttagaattgaaccaaaggaacacgatacacacttggtcgacgatacgtgagtgtatcctcatggatggcacgttgttctcgctgattgctgagcgagcctcaagcaacgatgtcccagactacgaaatgacatccccattagccggaaaccaagctcaagacgacaatccgtccgcccgcttccctccttacctacatcgatcaaagcgcctattttaagcaactcgccaggatatgccaaggctacccatgcatcagcacgggcaaccgcaaagacatatccaagcctcagggatctatagccaggaggtgccggtgtccgcatcagtctcctcacctcggccaagaaaagcgtcttgtagagggggaggtgcttccctacatcaggtcagtgcctgttacggagatgggctgtcttctcaggtgcagtaccccctccataatggatgaccactgtgcttgtaccgttgtcatgcagcacgatctcttccgggaattcttccggggcagggttatgaggggaagataccaggctgtggttaggcacagggattcgactccaatctctccaatccgcccgagtgctgctgctggtgccggcactggtttcatttcttgatcttgacagaacatccggccgtctgataaagaattcgcgcgctttcgttgcaagtggaaccggacaatcgcccatgctgagggcggtagtgggcatgcttggaacgtgatcggcgctgatggggctatgtgccgattctgctgaggagtgagtcgaaagtccttttcctggaatataaaaaggtataccgctggcacatctcgcacaatctcggcgcagagatgcgcaggatttcgagaacattcgagcggtatatgttacgctggtgcttgaaccttcggaaggaatctacaagcaaaataccatatacaacggccttggcgctaaccaatagagatccgtgcgttgtctttggctacaatgttatgcctaatacgaaacaacgtggtcagcctgtaattctaatgaaaagcaggctgtacgatcgactcacgagatagctataagtcttcatatcgtttcgttccaagtactctctctgtgtatggaccagagtcatcagcttgacatgtaacccctgtgagaaaagcccgaaccctgactcacgtcgataagcccttcgatccgtttcttgatgacggctggggtcggggtgaaccgggtcatcaactgtcgcacgacttcggcgaccaattcgttgtgcgagagcgtctttctcgctttcataattcgtacaatgcaagcctggcagagaggctataggtgagacgcggcaatctaacgacaagcgctttgactagaacgtacctctatctgatgcttcctctcttcatcgacccgctcctgagtctcggcacgctcctcgttgttttcgactttgccgacaatggtctgaatcttgatcttggccagagggcacgtgaatccgtcgttgaacgagaaatggtcgttcggcccgacgtctcggcctttgggatgtttcgttagaatccggaatttaccgcatgccaaagactgcaagctccgaccgaggtcactatcgggaatctgcgtcgcggccttgatgtcctgcgagaggtgatgccggatgtcagtgcacagcgacaaggccgacgacgaacgagtgacttgcctgcaagctcaactcctcgttgtcttccagattctcgaatagcaagaggatgaccaagcaatgcgtgctgacgttgagttcgtgcttgcgagctttgaaagcgaccttgatatcggcggtaccgtgattcgattgccatgtcaatcgtcttccagaatgtcggttgtgatagaatcgttcgaaatcggcaatgctaccggtcaaggcgggtgggaatacgcatgtggtcgcggtcccctcgcccggccagaaggtagaggtcaggacggtgacgttcaggtctactgcagaggcctatgaaacgagcggtgtgagccaccagcgacatcgtgcaagatcgaatcatgctgacctcggccttgttgtgtttcgcccgctggtaaccattcatcatctcggtagacagtcgcatatcgttgaacattccctctagcttttgagtgaattgatatcctctggatgggcagggcagtatcgtcagtacggtatgcgccgactttggcgaccagacgatacactcacgactcgaccttgagcctcgcaaccatattcctctcggcatcctcggacacgctccttccgttcaagagtcgcttggccaggtgagctttgtagtaacgttcaaacacgtccttgtcgataatgaagcggaagagaacgatcgtcttgtccaacacggcgtcgacctcttcgtcggttttctgtcagtccaatagggcttgtcaacaagagtaatcccagtgcttgtaaagttggaaacgcacccctttaagccctttcttcaggttctcatcgatgaacagcgagatgaattcttgacatcgcgggttctggttgatgaacgtttgaaacgcctacgttgtcgacctggtcagctttcgcgcaacgtgcacggccagtccagaccgaaacttgcctcgttcatcgacatttgtatccccttgttctcctcgaacgcctctttcagaaccctgtcaaacttgtccttgagatcgaccacctcttgcacccaacgaagagccgccgccaccgccgccgctcccgacaaaacaggtctcttggctttggcgacttcctcgtcgacctgaggggcatcttgggtcgtccctggggcttcgcctcctaataccgaagcgttgatcgcaccaccgcgagcttggacagtctttttcaaagcgagcttgaggacctctagtccttcgggtacgagcgggcggccaaacagttcgtagagtcggtgcaggtctgctatcctatcgtcatcgaccattgtgaccaagcctgatccaggcatgctgagaatggtatcgaggtggttcgcaagcaagtgttgttcgaggatgggcagcaaacgctctgccgtcgaggcgacgaggtatgtcgagcaccgagcgtgttcttcttgtatccgtcgttcgacctgtcacggagcgaccagtcatggaggatgagcgacaaagaccagtcccggactggccagatctcgagactcaccagtcgcaagtacgtgctcgcatcaaacgcctgcaaactactctccgcctcctccttgtaaaactcttcactctttcgcagaaacactggttcgaaatcgacctcgtacgcgctcttgacgcctcgtttccccttttcctgaacgatgagcagagccataatgtctacgacgtcccgcatggcggaccgcgagatgatctcgcccgtacgttcgaggtggatttgagtcaagagggtcgagatgaggatggtctggatcggggaaatcgtcgagtggataatgttgatcgagaagagccgtttcccgagctcgtgacattggggtacgtttgccgacggggtatacaccttgtcctgcgatgaggttccatcgagggtcagctgcgtcacctcgatagctcggcgcccgatatgctacgcaccatgtacttcaggatcttgctcagcttgtccatactcgagatgtgatcgtcccataccgccttcaatgccttcaagaacctctctccctcgagcgcactctcgatcgattgcacgtttggtccgctcgatccgctcgccgaaggacctccgtccggcgcatttccgatcccgagcgtcttgagcggatttgttgaagtggtattgctgttcatgacgccggaacgaggaaaagtcgggacgatatctttgcgagcgagatcgtctaggtgctcggcgatgagtttcctgacacccgcatagagcttgtctccgtctgatggcagcctggatgttcagcaacatctcgtggtcaggtgggatcaggcgtctgctcacgattgtgaagtaccatcttgtacccatatcgataattctcctcaaaactgagtcgactggcatgatgttgctgaatctccttgattgcgagggcaagcttggtccagatctcgtcgatatcttggtcgggtccgtactatgatccagagtcagtcggatcgataggcatggtcagccagtggtatgcgagctggctggtcacacaaaagtcgaactcacatttcggggtggtctctgttgaacgtgtgtccgagtgtaccggtagacagtcagctgtcaaattcgtgcaacaatgcaccccacggcgggtgacagcgtaccatcttggccttgctcctcagcctggcattgctgcctcccatcaaggtagccatcttgagacggtccttctgcaacgacccaagctattcccgacacgacttgctgtcaatccagaagtaagtgatgacgaggcgagagaaagttgactttttattatgctgccaacgtcgagaacgtcgctgcttcaaggctcgaatgacgtggtgacgggagtcgtggcaatgctatgcttatgcgatgcggaaggtgtgagaatctgtagtcaactagagtcgttgatacactagctaggtcgatgatgaaatgcatagtcaacacgcatcgccacaactggctctacgcggtcaaagggccgcgaacaaccaaggacagggtacaaagttggaaagaggtcaagcatactggtataccgatcgatcgacgtctgggtcaaccccacaagcaactcatcgttcatccgttcatcaaggaaaacgttcaggacagtggctctaatagatatacagaaaggcatggcaccacctcgaatcagtacccagcgctctccatcttttttgccttttcctgctcgagtcgctatgcaatcgacaagacacgttcagccgccaaatctccaatcacctgtctgatcgtatcgcactcacagcatgcaacatgctgacggccatgttcaagttggtcgggtgtccgctgataatgatcaatcgttcgcccgggttgacgggtccgccaggagtggcaggggtacccgggtccgtcactcgaacgtgacactgagattgcgttcggatctcgttgatcttgattccggccttgccgatgactggcggtggaacaggtttgtcagcccgtccactcccctagagcctgccttgcaagcccagactctactcactactaccgacgagctcgtccgggatccaaaactgctggactgcagcaccgggaccgggcgcaatgacggccggctgccgaggcgcacctacaccagcgctcgagctggcacctccttgctgtcggtaggctcccgagccggcaccgctgctgcccgccctctcctggtattcgagcagaatggtcccgatgtagtagacggcaatgtgcacggcatcggcgactccagagacgctcaagattcgctgcaaatcgaatcggcatgatgtcagcagagacttcttgcgacctaccgttcgtcatcgccactgacctcggtacttccgggcaacatttgctcgctggcgttcagcctggctccactagcctcttgaatctccttgatcttgctacctcccttgccgatcctaagaacccgatcgcgaaacccgttcagcgacgagcctgtcaaaagcctctgtgcgaccctactcacacgctacccatcctgctattggggatcatgaacttgatcgtgaccggtcggcttccgggcatggagggctggtcaaacggttcatcgttgatcctcctgacgatgagtccaaaggcctgttggtcggatcagagtattcggacccggatcagctgactgaacggtgacgacgactgaagagcgcgcccaaagactcgccttggcgacggcatcgagcgctccttgaacgctgagaatcctttcggggttcccagggatagactctgagatgtttaccctcgcgttcgcttggctctgtgtccgatggtaacaacacaatcagcaccgcttgcccgcgagattaaggtgaccatcaactctgaacccaccctgatctcggcgatgtgcctgccctgcttcccgatgatcacgctcgcatccatggtgacgatcaagcaacgcatgttgatgacctgacttccagaggcttgcgagtcggcgcccgagacggccgatccgggagggttggatcctccggccgagttgggtggggcgtgggtctggggagtagggggcagggattcatgggcaggagggagttgagagctggcgatgaccaaaatgagtagcgggcgagatttagtcgacaaacgttgacgtccacaaactctcagactcacccagtgttggtagcagggttgctaggagcagtctcgacttgcataggagcgctcgccgaagcagtctcgtccttcactgcttcgtttaccttttcgtccttgatcatgacgggcgcgacttcgtgtttttctgcctcttccgacgtggtctcgatcccggtgttggctcgcttgagactccgctcgtcgacttgttccgaaggcgagtccgaacgttctctcttggtagaggccgtcgtaggggtgagtacgggtttggtttcttccgacatgatcgatgatatggtgcacgacgtctaggtcgatggcctgtccggtattgaaagggcgaacgagcgaggtgcgggctggacgaaaaggagaaagggaggaatctcgtgtgggtaatcgttgcttggtcgtacgaaagggaaatcacgtccacgatcgggcagtagcagtgcatggcaggtcattgtcgggatgtgcctttgttcgctcgctgcctcgatcaccccctttcttctcgcacggacccgccgcggttcatcacatttctgatgtcgaggggagattcggagaacggaaagagacgagagacgagaggaagaacggaggaacggaacaggagagaaggacatacggatcaggaagtgtgtgggtgggtgggctgtctcttatacttcccctctacccctcccccctcgcgactcatcctggaccaggttattcagcgagcaagacgctgcaatcgtacgccatgtacctcgaatcccggattcacgggtacaaggcgttgaagcacgatccgatccgggtgcagagtgagaataatcggaagagtcagtacgaggggtcgagtggtgagtctctgtgcagccttacccgagggcggaccttgagctttgttggggggcgagggcgagtccggggctgatgtcgagggggatgggtcatgcgccccgcgggttcttttgcaggtaggacgggaaagttgaatagcttgacggtggacaagggcttgttacgtgaagtacgggaggtacaaaagatcgtagcgtgtctcattcaatgtcgagtgagtcgtccgtccttcaactttggccacggtcgcgtcgtcctcgtcgctgacaatgtcgagtgggcgctcgacgcagttcttcgacgacgacctcgaggacccttgtagtaacatggcttgcaggatgatcgtcaaggatctcctcgtcctcacgcaggccgtcaacgagggcgtcgtcaacctactcggtaagtcactcctcgtcctcttctggaccattcgctccgcctgttctcggctcgacgcggcactgatacgtcattcttgacaaaatgggcaaacgacgatagaacactactttgagatggtcaagacggacgcacaagaagccttgtccatctacaaggcgtttgtcaagcaaaacgacaaggtggtcgactacctgaataccgcacggcggttgaagaacgtgctcgacgttcccgtgcccaacctcaaacacgtgagtctcatcgtccggagttctgataggggatatcatcgacgttaaaggctgattgaacatgatactctcggcgaaacaggccccggtctccctggtcagggcgttggaggaatacctgcacgaccctaatttcgagcagaacaggctcgaatacaggcaaaacatgtcggcagctgatgtcccaacctcgacccgcgctcgtgagtgtctagcttgggcttgaccggaaattcaaggcgtctgctgatcggccgacctcgtcacagcgtcggcttcgcctgcaccccctgcgccgaagcctgccgagtcttctcggccggcagcatcgtcctccaccctggctccgcccgtttcgacctcttctacctcggcccccgcaccgaccgctcaacggcaagtcaaccggacgatacaggacttcttgagcagtatcgaagaggaacaaaaacagcagcaacagcagatgcccgggatgggcggagggaacaggtgagtctagcgaccaggaggtcggatttgtccacgtctgaccaccgactacccgtccacagcttcatggggatgggtcagatgaacacggccaacccatacgctcaatctcagcagccaatggccaatccgttccgacagtccatgttccctcaggcaactgggttcaatccgatgcaagcccaggcgaccgggtttcctaatcaacaaccgctccagcagccaaacatgcagatgatgccgcagcagaccgggttcatgcaaccccaggcgacgccacagcagcaaccgcagcaaaacgcgttcatccagccgcaacaggccggatttgggcaaccggcacctttcgcgcaacctcaacagaccgggttccaacaggcgccattctctcagcccgcgccgctccaaccgcaggccaccggtttcaacccattcaggcaatcgatgatgatgcctcaaaacaccggcctgcccttcagaagcccgtctgaaaacgcattcacatcgatgccccggtcgacttcggcacctctcaactcgtccaatacagagccgaaacccttgacagctcaggctaccggtaccaacaacccgttcgccctgccgtcggatcgcgtacccaaaaaacaagccccggccgggccgtctttgtttgagctggccatgcataaatccatgtcgaacaacatacaacaacaacagcaaactgaacaggtcgagactttgcaggggaacgccccggcaccgatggtaccccaagcgaccggtttcgcggggagttcgatcgttcccttttcgagcaggatggggaattcgacattgggtcaatcgtccggtgcgaatgcgcaggcatcacaaacaaccggcatgcccagtaacagtgcaggcgcttcctcggccggcaacaacagtaatagcttcatgtcggacctcgcttcggcatttgcggttacgagcaccaacgatacgagcaagtcaccctccgataacgcgaccggcagcaacaactttggtagcgctttcgggtcgagcggattgttcaatcagtcgacgggcgcgaccaacacgtctagtaacaatctgtttggtcagacgacaggtacgacagcgatcagctcgcctcctcccgcaacgccgagctcgacggcaggattcctgcagccgcaagccaccgggttcgctggcagttcgatcaagccgttcaagccgtcgtcgaattttgggtcgaccttggttaccgacatgccttcgtcgagcctgtcaccgaatcagactggtttcggtggcttgccgactcagtcaaccggagcaagcccgagctcgcccttcggagcgggcttcggttctgctttcgggggacaaggtcagggtcagggccagggtcagagccaggctggcgggatgaaaccgcaggcgacgggctacaatccgtttggttccagtcaaggcatgggcaacagcggtaacaacaatgacaccgacctgatgtccatctttggcggaggatctggacagcaacaacaacagcaacctcagcaatcggccgggtcgcccttcggccagccgtttggtaacaccaacagacagaccggcaatcaacagaccaacaccaactggatgacctctttctaatgggtcatggtacctcctcttataccctcaccttacaacaccatcgtttaccgactgttgtagaatcgctctccacctcactttcgatctcgtctgcctgttactgaaaccccttgttgctgttgtccttttacttactggttgtcatgctcgtcgaggaggaaaaaggaggtcggctcgaaagtctcgcccttcttgtcgttgacctccgtatcttgtatgccgtagaagaggacaggaaagatgtcgactataataatgatggaatcatgctcgcttgatacacgggttgatcatacacacacgccgcaacagattgctgagtccaggaacgttgttggtacaacatctcaggcgagaggaggcaggagacagcactgattacattatccttcttcgagttgctgccagtctcaaagtttcgtgatccctggtcggatcgtgagcatttgaacagactggttcgagagcgatcgtcctatctcggcccatcgtccgggtaataagatcgacggagatgccgaaactttttcagcgatagcatagcgagcacctctatttcagatagagaacgggggaagcaaggcaggtcggaatgagaaataggaattgctcgatcagtccggcgtgcattacgatgatgcaggggatgagcggaaatgtaaactcgcccttctttacgtgttcccccaacgccagattcttctcgatcaactcagggtccgtcacgttggcgttctctgggaggtttaaaagggttatgatctcgtcagaatctttcggtcgaaccgcaaactaggtgagcgaggagcgggaccatggctcactctcgtaggctcctcgaagacgtttagcaaaccattgtgggtcgggactgtgatcgcgtcagacatccaagttgagctctgactattccgatcgaaaagcattgtgagaagaaatcatggactgactagtctcttccaagacgatgtagctgtcgatatcatcagagcttatctcagtgttcagagcaaagttggcgagggaaagacatggctaacctctttgtagagcttgatggctcgcagcctgtagcttagaggagctacgggtgtcatttcatcaactgccggtattacggctacttcagaaaagtatcctgcagaaagtgggcttgtttatgactgatctatgccgttggaaagctgaccggtaatcgtatgatccgtatgaatgtgaacggatgttagcgactcgacttgggacccagatgacctcgatcgtctcgctcgggctcggccgaaccccgaagaacgagtcaacaggtaaaggtcacggtatggatggtcgcaataatgtgtttagaccgatgagcacatgcgcacatacggccggagatcgaggcaataatggtaggaacgtttgtacatcctgaaactcgctacgatcgctgagtctgactaggctacaagcttggacggacttgcaatatgagattttcacggcagcgaaccgcactccagttgtcgagcgggttccagactacgggttccgagacgtcaccggaatcacacatgtggcgtgacagaatcaccttcagtcctctcataatacaactcggatcgacccagattacaactttgttagaagccttcggaacccctggtgattgtacatttgaatcaaacagatggtcatcactaccccttctaagaatcatggagcacccgacgtgatctcccttatatcccgcgacgtcgtaccgcttggtacccttgtgaagtcgtcatctgcctctttgagcctcttctcctagtgttccctgtcggtcgaacgacagctcttctccctgcatcgcctcgaccttgtgttccttccgcgttggcttgtaggagcgcgtcctcgaaatccgaaacgtcttcaacgtcttcttccgccaccgcacagcgtcctatcgattcaccatacgccttcaaccggtactgtctctccagcgcctcaaagtacccgtccatgctcggcactctcgcctcgaaatctaccggccatcctgtagcagtgcgaaaggacgatccgacaaacgttcgaaaggccgagtacaagctctccacttcgaggcacgccgatttttcatcccagtgcgctctctccatcacgcacagccggacgtatgattgcatcatggccgtgtaggcaatttggacgtgttcgacctcggggatgaaacgccaggatggtgtcccatcgttccgcgtagtcatttgatcatgcatcgctcgatacagccgagcgaactgggtgtaggcgctatcgtacgcttggacggcttgtttcagcccgagtcgatgcctggtggacaagatcgcttgggaccgttgcccggccgtccagtcgacttcggctgaacagcgtcgttgtggcatgccgggctcgtcgtgttgtcgccccggcttgcgtcttttcgacttttgcctcgtctcctcagtatcccgatcgagttcctgcaacctcccgtataacgcgatacaaatccggctcgacccctcttgatccgtcgaccgacgcataaagtctactcctcgctcactgtcgaccgagcgggcatcgctgtgtcttgatagggattcgtgaggttcatcatcggaccaggcggactttgacatcctcgaactcgtttgcggccatggatcgatggttcagagatgtgtgctcaatcagaacagtcgagtcgatgagcgaaagcgatcgactgttgaccgctactaccggtaatagggcaaagcttcgaacgggcggctggaggctgtgcttttgaagtggtctagctatatagggcacgcttagcagcacggtcacagcggtatgatgtcagaaggcaaaacgtttgtgaggagatggtgcgaaatggccttcgatcacatcaatacggcgcgacggtgcgccttatacgccgtagaccccgtggactttcttgcttgaaacccttttgtaccagttcgagatgccatcgagttccagctcgatgagacgagatttcgtgctcagaacagcgtgcccccacgccattccttggcttcaaacggagaatcacataaaggaagggccaacacagccaacgggatcccccggaccatccggaccgtaacgaaggtgaaaagactcggaaagagaaggctatgggcgtcgagaagctgtccgttgcgatgtcgctgatgtgcatgaaggtctttcggcaccaggacaatggttgatcccgccgagggcgttatatctcgcaattgattgcctcactcccgcttctccgcaaaacaatcagaatccagaggtctccgtggggaatatgaaagcatcgattttcaaaacggctgtaacagggtctgtgtcgaagctgtgtcaaagtgattgcaattgatgagcacacaataacaagagctgatgaaaatggctacgtgcagtccggaataaatcggttcaaaagatgtttgcggcacgaccactttatgtgcacagcgatactgcaacgaactagctgataagtcttgagcaggagcggagtggcgagacgtgatctcatctttgaatctcgggaactctgaagcttcggcacactgagtaatccaaatttgccttggcaacgagggtgtgtctcgtcgtactcttttatctcggcttctttgttatagtggatatactgaaagtgggccctattgaaaagctaagctgccctggtcgcggtccaggtcagagtctgaaagccgataatctcggcccaggcgaacacagtgtgagtgatgccagactcacccaacaatcagtcgcggttcagcagagggtcagggtcggaaggcgttgggattcaggcgtgagaattgggaatcaacgtttgacgccgtgtataggacaagacttcgaggactgtcgctctatactgacttccgtacgaagtcacgggtgagactcttcaatgtcttcctcatcgtcatccgcttccaaagcggtaccgctatcgtcttgggtcatcctggcgggggggacctcattccacactgtctacactctgcaaagacaggatgccaagtttgtctccaaccaggcaatctacaacctccagatcacatagaggttgagcagagaggcagccatcagggaggatgacagggggtacgggtatgaggtgggaagagatgggtcctagaggtcagtcgcgatcgacggttgtcggtcgcaatcgacagtctcgtcgcgatcgacgtgatcgacgtgttttcctcgatggttgatgattccgatgtttcgacgctgttctgataacgatttttttaatgatttcgacagatgtgtaggcaagtcttttggagatctctttgaaaagctggtctacagcatcttcaaggatatgttagggggaaggatagacaactggacaagagttgatcctggacggatactttctccgatacactgaatgcataggcgggttcgacgagcgtgtcacgagtcctccgatcgatatgtcgtgagtaaagtcgtcgactcagaaaaggaattcggactttgctaatcgccttaaatacaagcttttcatgaggtagaatatgcttgagcctacaaataaccttctagatgaaccttaaacttcgattccagtgtgcacatcaagcgttcctgatacaactacagggcgcccaggccaaaactcagctagaccaaaagtgaccgttaatcggcaggccagatatgttcgaccccccactttgtgagcggtgattcgacgaatgtgaaaagtctccaaccacgggtgaagagttggtcgcggcggggggcttctttttccgtggcttctgtctgccttcgcgcttggcctgaagacgtgccagcttcagaccgcaactagagggaaagtctcgggaggtgtcaacaagccgaaacgatcgacagaacgtccaagcaacatacgcgttgcaaagattcttgatgccgttttcagatttacgccactcggggctgtgcacaggcataagtgagctggaaatcgacgtagagctcgcacatcctgcgcttacctctcctttgttgcacattgtatgcagcattcgatgccatcgggaggcggtacagctggtctgagaggctccttttccgctgcggtcgcagcctttctcttctggtcgatctcttgttgttcgatgagcgtggtgctgccccgcgtgagagttggctgagggaagttggacggatgcacaggctggcctgccgaaaatgcaggcatgccagatccgagagcaggatccagtaccgtggggtatgatggcatgtactgcccttcgaaaccaaccccgtcgagcataatgctatcgtccatctcgtagggtttacgtttcacgcctcgtggatcgcccggatacacgtttgacatcgattccccttcggctcgaggtgatggtggtcgaatcaaggcgatcggctgtggtgcccaatcagctaattctacaggataaagcgactgctgtgacgctacaccgagcgggtccgctcgctgcaaagcttgcggataatgagaaccggccggcagagatccctcgaacgattgggagggatagatgttctggtctgaaaactcgtaacctgtcacgagggcgccttgctgcgcatcataagtattcgaagaaagtcctggtggcggaggtgaccgagatgacgggggcttgactgtctgagtggtcgaaggtgagtagagtggaaagcctagcttgtcgctggaccccatgatggaattcgacgccgccatgcgttctagcgggtccaccggcagcagatgagatggcatcggtgaggggccgcttgcaaacgttgctagctgtggcgggccttgaaccggcggaacgacttcagagccgttggctggccagacgtttgggatccaggggatctggctctgcggttgcccaccgggcatgaccacctggggtgtcgagccagcgggagcttcactgaggggcatgagttgaaccgtctggaagcacgcaaatgtgatcttgccgtaaggtatgaacacgctctcgatcttgcgccagacgccctcgttggtgagcaggtgaccgccttgaaagcgttgggtacagctcgtcttgccgaaagtaccccaggcgtctggtcgaccggtcttgttttccagctcgacgtgcttcatcaattcggcataatcttgagcccagtatttgccgtccatacggggcacgagctcgcttcgtctccttccgagcatgtcgagctcgtcttcgtccacgtcgtcgtcctctgtcgagctcgtccacgcctcacctccgagtactttgatgaccttgtcatccatctcgacctcgaatttcttgcgtatccgaggaggaggccaggcgaaaataaccgtgtcgggtcgtatgtttgattcctcggtggcatggatgagaaagacgcgttctggaggaggtgcaggcgtttgaatcggcttgactggcaaggccttgctgacatcgtcccacatgaactcgaggtcctgtacagacatcagaccaaagcgacgaccttagcaagagttgactacggccgaacccgcgtctactgacctcgtcagtaaaaccaggtgtcccgcaataattcgaccactcctgatgccgcagtttcgggtcgttgttggtctccttgtccttgtccttgatggcgtggaaaaaggccagtatgaggccgtcacaagcctatggtcaggcagaggtcaaggttagcagggatcgtccatccgacgagctaacagctcacccagtgcaagctgaggtcgacaataaggtactcgtcgtcttccacgaatttgtatgcgtcggacgggatgtcctcgtcctctggtggacatccgaggatagtcctgattcttgacagtcgagcgaaccgcactctgataacgacagggccatcagttctgtctaggtcacggggccgatacgctaccgtgactgggacctaccttgtgacgctgccttccaggttattcaacctggtcgacgaatacacatctcttcgcgcctctaggaatcgaaacccggatggtaccagcgggtcagcgcggggttttcaaagccgtttcgcgcgacactcacgttctctctcctctggatgtataaactcgatcactcctctgcctagcatgctcatgctctgcgtcctcatgtgcacgctcaagaccgggtccaagtgaacgaaatcgagttcgaaccgcttttttttcctgccggccgggttcgaattcgagttgactggcgcagaggtcccgtttggtgttgattcgtgtgctggcaagccagaacgagtcgaggtgtatggtgacgaagccgacgagggtgtcgaagcagacgccgcttgcgggacgtcgcattcggatagaggatagcgaggtttcagcatggcccaatctatcaaagcaagagacgtttcagcattggtcaatctttggagaaacatcgtgtctgcgctcaagacttgcagcatctggcaagggccggggcgtcacgtcaacacaaaccaagtcagttcggggttccgctattacgctacagacgcaaaccctcacctgactcctccgactctaggtacgtccgctggaggtccactgcctctgcttcccgaactggccacgctgaccacgctacctcctctgctaagcaccctgccacgtttcagtggtgcttgcggttcctgccctgcgaggcgagccgcctgattctgagcctgagatggggattgtctatgcgctgctgcacaggatgtcgatgcgatggcggtggcggtttcgatggcatcatgcgagctcgagccttgatcgggctgatcaccctgtgggccggtaacaaggccaactccagccgaggcagtagggaaagggatggaattggtccccaacccgttcaaaccgtctccctggctcgagcccgggtacccttgcagaccgtactgcggaaacccctcggtcgaactggtcccgttcgaaccgatctgggaagacgagtacgtttgccctacacctgtgccgtgggaaggagccgaaagatacccattccctgagcctgtcgacgtctgccctgttacatgtgggagcaagtccgagctcctcgtccgacctcccgtgatagaagtcgcgctctgtccctgcgcatccgtattccccgttcctccgcccaccccggacaacgagctcgaccccggctgtgcggcgggattcattcccatctgactctggatatgtccgtatgcttgattcaacggatgccttttgggtgaaatgtacctcgatgtgctcttctccggactcgcgctcgcactcggtctcgaccccggaagtgtgcccgcggggagaccagctacagctgcagctcccgatccagacccagatccagatccagatccagctccggaagaaggtgtgataggggatcctcctactgcagaggccgatgccgatgctgacgccgagcctgaaaccggggtcgcagagctaggcagatcgttcacgttcccgttcccgttcccattttggtacccgttggatcccgatccagcctggtgctgcgatcgtggctgtggctgtggttcctgttgttggtactgttgttgctgctgaggctggtgctgttgctgctgaggctgatgctgttgttgatactgctgccgagtctgttgcgggtacgcctgaccgacattgacggagtacaacaactgaccactcgggtactgatactgtccttgcccttgcccttgcccttgcccttgcccttgcccttgcccttgcccttgcccttgcccttgtccctgttcttgtccctgtatcgtcgattgacctccatacgactgtccctctagaccggggtaggcgaacccgttatcatgactatggggatacccctgcgtcccattaggcagtgtgacgccggtcccgttcatcccctgacctggaccttgactggaagatccctgcatgacgtacgttcaggaggttcgttcgtgagctctcggaccttcgcgggtaccctccaaacgcctgagctggtctcggtcggcttggatcgggatgtcgagcaagagtctctgtctcgaagacccggtagatagatagacgatgagccggttgtcgagctcgattgacctgactggtggcccaagactgagtgtgagctagatcgagctatcggatctactagggtgtatcccgaccagagacgcgtgtgacgcgatgggttaatccctctagctagctttcaaggggggcgagaggatgttgccctgttccacctggtcgatatcgatatcgatgtcgggatggaaccggcacgttgaggatcgctcgtcagattactaatgatattgactcgtcgaaccgggattcagaccatccttcccgatcctctgactgaaatccaggctagttctgtccagacgaacgtgtctgtctgcgtatgtgtgtatgtgtgcttttcgtaccgtgtagacctggtgggcaagtcgcctgcgtctcgatggaaatctcggcaagctggtcgatctcgaaaggccggtggggggttctcggtactttgccgcacgcacgaccgactaccacgactggctagcggtgggaaaggttcgcaatgacgggtgtacgattcgacccgatggtgatacgtctattctggtgtatcttgccgttcagactacaagagtatgtgtggggaggggtatgactatgtaataatgctcgactatcattcatcgtgtgcatatgtgcaggtgaacaggctcggtcgctcggtcgcggtcggtcgcgatcggggacaagttgaacgtttggacaaggttcggttccgacgatagacagaccggggaaacgattcaaccacatcctcgctcggatcactccagtggattaccagtcagtagtatttgcaagacgtagaccaggaggtgctgctcgttgagattatggtcgtggtgttcaagtcggtcgtcaacctatggtgagatggtgatcaaagtgatgtgtgagacgagtttcccttccaggaaccacctctacccccgttcattcgttctgtgccgagacggcgcggtcgacacgtaacgaccgacgtggtgattcaacgtctatcaacaacgacaacaacacactaccgctcctcctgaaatccccatagcccttgaggaaagggctttctcccttgtggatgcagcaggaccagcgaccaggtgcgaccatcgtcacacacctactgaacaccaccctgttagttgcccgttatgatcgccgttgctagtagtgtgtgatcatgtgacttgccgcgatcgacacttactccttcatacctcttccgctgcacccggacgaccggctcgggagcacgcaatattagcgagtgaggaaagcagaaacccatatcatcgcccactgactatcgtacaccaacaccgaggctcctcttcgctctcgtctccctgctatccatcatcatatgttccgataactgctcgactctcagctccttgatcgtgcgaccatgcagaaaccgccggttaatccctggcctagtccttcccccctgctctcctttgacaactcgcgctcgaccgatcgcttcaggaaaggggaggtggtgagatcacgtgatctccctcttgacccccgatgctgctctgggggatgtgggggattccttcaaggtatcccatagacatgagacatcgtggatgatggtagatcgacctcatatgaacgatcgaacgtcgttgacacgactttgcttgagtttcgacgtctgtgatgggttttccgtgaatctcgacctctccccgtttttacattgcaatgacagctctttagatcatattcaaaggccgggctttttcaccagagacgaatgtgatacgatgcgaagtgatgatgtcgggcatcgcgggtatcgctgggacgatggcaggggatagatccggcttcatcgtcggtgaaacgccaggcaactcggagatgaatatatgagagacttgttcatgaccattctctacgccccaacgcacattcgggatcgcccgaggggtcggaggtatgacgcgatcagagggatgccgccatcccgaaatcacgcaaaacaggcgacgcctcttgtcgtcgtcgtgacacgatgtgacgagggatcgagccgggagttgcgagtcaccaatgaacatccgaatttatatgtccatctcgatgggatagaccggtccgaccctattcggaatgctcccccggtctcggcttcatctccccgcaactcggctcggcttcatttcggttgtctccctcctctcgcgcgggcggtttcggatccgcttcacgcgcgccgtcgatcgtcatctgatcatcggatcgagcaaaaagtcccagaaacaaactattccgaataaccctcgacctcggccctttgaatcgtgcagagtggcaaacgtgcaggcttggaaaggctacggcaatatactttcacttccatgcatttacagcgtccaggaaaacgttacggttatatgaatcggagaaaagtaacagcgacaacggttacatcaggcatctcgatcttataataagaataggggtaaacccatcaagaacctagcaacccaacgcccaagcgctttttgacccacagacttgattccatctagacgtcgaatcgtagctcacaccatgtcctcttccacttcgtcgggctcggccccaccctaccaccctctaacaagggaatggcgacgccggatcctcaatttcactccttcctggttcgccgtcaacatgggcaccgggatcgtctcgatcttgctgtacaacctgccctaccaattcaaaggtctcaatatcatcggcatcgtcatcttttgcctgaacatcctgttgttctcggtattcttcgtcatcaccctgtaagtgagctcccggtttcgacgttgccttcccgtcctctgtcgttccccatcaccaccactgactcgaccaccccctttaccctctacaggctccggtatatcctctggccgaccgtattcaagaggatgttataccacccccaacagtccctcttcctcggtacgctgcccatgggattcgccacgatcgtcaacatggtcgtctttgcctgcgtaccggcgttcggacaaaaattcgtcacgttggcatggacgttgtggtggatagacagcgtcgtcgctatcgtcatcgccatcggggttccctttatcatgtgagtcgacggacattccttcttcgtctgactcctgatgacccggttgatactgacgacatgaaccgccacctgcctcacaggttcacacagcataaacacgaagtctcgggagtgaccggggtttggctacaaccttcagtatccaccatcgtcgcttctgcttcgggagcgatcgttgccgagtacctccctccggggcatgccaaattgacagtggtcatcagctacatcttgctcggcacggggttcctaccggccttgttgatcatgggcatgtacttccaccgattagctatccacaaggtcagtcccggtcgacatcaagcgggtccgccgtatcatggtggacgagaagagatcgagactgacgaccttgttcatttcatcgacgtatccccggcagatcccctcgaacgcgttgatcgtatctacctacctccccctcggtccttgtgggcaaggcgggttcgccatcctccgtctgagctcggtcatccgtaccctgtgtatgcaatccgaggggacctcgttgtactcggcggaagagatcaggttgttcgggagcgccatctacgcttgttccatcccgtgagccgtataaacaaccgcgagtttgcttcaaaaggtgacccctccgctgacccgctcgccacgccggtcatcagtatcgccctggtcatctggggcttcggactcgtctggctcgtcctcgccacatcgtcggtgcttaaccttatgcgccgcgaaaaggtcggtttcaacatgggctggtggggtttcactttccccatcggcgtgttcgccgtgtgtacgacccagttcgggaccgagttggattccatggcgttcaaggtgctcgggaccatactctcgtgcacggtcgtcctcctatggatgtacgtggggacgatgaccttgattcgagcatggaccggagtcatgtgagtcgatcggacggtagactcggccgcatctctgcgcgtcccgcttgcttacccggctcgtcatctcgcagctttattgcaccttgcttgggagcgctcgaggcagagttgttgccgaaaaagggagaacaggttgaatcggcaatcgcatcgccagagagcaagtgagagggaagcgtccccccataatgtagccaaaagcaacctcgccaggagaggattcatatcacacgacacatgtaatatagacagtagcagcattgacccaaaaagcatggtttagattatcataattgaagacggcgggaggtgcggattcatcacgagatacgaagcgaggcgtcagaccggtcaagacaaggcaagacggcgacgatatacgtggtcattgagaatataagagcgtgtagtggaagagtgtaatcacaacttgctttatgagggaacggcgcggcgcggcgcagaccaaatcagcttatggccatgggtgaactggtgcgggagtcagcggattggcaagacttatggatactggatatctggtacttcttgtccatctcaggcatatgctccttggcacagcagctccctcttgctgctcttcatgctcgactggacgagtgggggacgacggcaacaccctccaaccaggtccatcaatttgtcaaatattttgacttgactcctggactgattctcagacattttcatttcaggttggaaaacttgatgctgcagcgacgccaactgccgtatgccaaatcgcaatgttggaggcatcgcgctcggggcgtaatagatggacccctcaacattgacacgaagaatggccaaaacgggctgggcaagtaacctgccgtacgttggcaagcccagcatcacccagaaaaaggcatcaaacaatatgagcaaggatggattggactggggatcgaaggcatcaacaagctctttccattagaaatgttcctccttgacaccgcttagtgtgaccaaacgtttcgctttcctatggattgttgatttggatctcggcaagaaatgcagagcatagctgccacagtgatagcttctcacagtgaatgcccgtggcatttcggcaacggctgccaggcatgatctgaactcaagccggggggccgaatcaccgtacgacccagaatataacctgttctgccggctgtgcttttgtcattatcaacccgagcaattggggcgatatccctgttcatccagtcgccgccagctggacccgtcaaactcgaacagtcttgggtcggcaagacatagacccagtgtctctgggcagaagaggccgtcgaggagcaccgctcattccttgatcagatgcgcccctcttcaatgtccattgattgatacctggtggcccgtcgcacaacccttttttgcacgccggtctatctgtttacaacttgttcttgacagactcgaccgacacctcgtccatctgcccttttgcccatcggtcgatcaggacaccggcgatggcggtcttgggagggaatctaaaggacggcggaggtccatccttgttggcgttctccttggccgtctcctcggtctgaccttcggccggcgcgagggcggcaccttcctgtacgccggcagcagtgttgacttgcctcggttcaaactttttgtgctccgagcgggtgatgttggtaccctccgggtgcgtcctgccaagagtcatcggttagcacgtgcttgacagacagtacgaccctgaatgacttgcaagactttgaggaccgactccttgtcgaaccactgagcgtcctcgagctcgttatccagctcgagatcgatcgagccggcgtccgaggcgaccagaccgtagcatccgatcatgaggttggcagggaagggcctgtagcgcgagggtgaagccttcaagatcagctggcggcgagactcgaactcgaacccgggtcacactcaccatggctggcaagaagagctgtcgaacaaggtactcttgtcagtgcgctgccaagtggaccgtattgaccgtcatgtctgactcactatcggacctctccgaccttgatcccggcttcctccatgacctcgcgtcttacggcgtcctcgatcgattctagaaggatatgcgacgagtgtcaactcccgcgatgttgaccagtcaggtgtttctacactgacctcccggttcaatgaatcccgccagacacgaatactataacaagttcatggcgatgagttgatcggctattcttcttcgtacactccagccgggtcagttggactgaccattcccttgggccaagctttctaccgggtcccgaaaacatcggccatcagtgcatgtcgacgtgatgtgcattcagaccacgaattcggactcacctgcctacccatcaacatcttcttgcccgtgggatccaggattcccatgatgatgaccgggtccgtcctcgggtaagcataattatgcaatcccttgctgtaaaccgcatcgcatctcgtcagcccgccgtgccccgagggaaggaaagcgagcggattctggatcacgacggggggactcacgtcgagggacaagtcttgccttgctgcccgtacccgtccttgccttcgcctacgatcgacccgcaaccgcgtttccagccgcaccagagggaatacgtcggggatccacaacctggacaaaacttgtacctcgtgttccagtctgtgcgtcgtcgtagggatacgtgagcgggcgatgttcgaacagggactttggggtggacgtacccatcaacgctctagcctgggcaaagatattggcctcccagcctcccatactactccccgccaacctgggttcgacaaactctgctccgtcgacgttggcgtcttccgcttcgagtccggtgacgtccaccgcaaagtacgccacaccctttgggttcttcgggtcgatctctgcggggactgctccgtctttggccgattccctgtcgtcgatccctaggaagacgagtgcgggcaaggtcgagggtaatctcgcggattggtacgtcttcgctacatccttgtcggtcgggtcgggacactctgcaaacgtcctcgcgttggcagggaggtaaggaccgatctcggtttgagacaagaaacgaagcccggtcggggtattgtcttgttctgacgaggtggtcatcaacggtttcccgttcctattcgcgatcgaccgtagggtgagcttgacagtaacccaggcgatccggggctgacgagcgttcctcaccggaagagcatgaagagagcttctggagagttcaaatgtttttccatcttgctcgtttcatttctatttgacattcggggccgtaatcgaatcagcattgccgtcgtcgagtcggacgacatcgtcgcctatcctagcttaccggtgaaacgacagcctgttcaagggcggctgacccgaatagaagctgcgatcgagtgcaaggtaccttgtcagcggtccgttttcgttcggtggtgagactcgagaagatggtcgaccgacttgacaatgttatcacccatgtagccggtaaacgtcctgtctaaagatatccgacggttatgaacgggggtgataagacgtgagatgcggagcggattgtatcgacgagcggttgatgagatggttcctagatacctctgtacagtcagaggtctagtcaacagttgcattcgatgagtagtgagggtggtaccgagtagagtagtgtcgtagcagacagtgtatatttacctcgcatcaccatagccttccttgtcactttcgcgtttgtcatcatcatcgatttcccgatttacttccgaaatcacacactacccactctctctataccattgcatgtatatatgtatatgattctctttctctctctctctctctctctctctctgattgttctccttgcttcgactacatcatcatgacaaccaacggaaccacgtctcgatcatcgatcatcattcgatcagaggttgctagtcatcggggtcttgggccaggcgctaccaccacaaagcaagagacacacacatacggtggatcagccatcgattcggctcgcacgacgaatatgccgcccgggcggacgcgggacgactcactatccctcgttcgatcgcttgaacccgtacttgccggtaaactcgtcaatctgcttgggtccacgagaaccgtaagggtactcttcgggcttgggagcctcgccgtccttgccgtcgatccagtgcaagatcggggtaaagatctaaagggtcggtgggaaggaaagcaaaaacacgcaatgccacgggagcggggtcaggtcaatgtcgccgccgcctgtacggatctcttgtcacccaccttccaagcgacgtccaattcgtcgtccctcacaaagttcgagtgatcgcccttgaaggcgtccaaaatcaaagactcgtaagcctcggggatcttggcctcggcgaacctcgacttgtaagtcaggtcgagctcggtcgggatggcccgggtgatcaaccctggggtcttggtgttgaacttcatgtagatggcttccgagggttgaattcggatgacgagctcgtttcgcgcaatgtcgtcaaagatgccggccgtcacgtccttgtactggattcgaatctcgaccttggcctcgttgagagctgcggcgggcatcagcgtggtcagctcgggacgtatcgcgtgggggtgcggagtacgcgggaccactcaccttttccagccttcatgatgaacggcacaccttcccatcgagggttgttgatccacaaggtcaacgcggcgaacgtggggcaaacggatcccttggggacggtatcgtcttcgaggtacccgggcttgccgttggcgccgacgtactgtccgagcaacgtgtcgtccctcgagatcgaggggatgcatcggaggactttgaccttttcgtcacgaatgtcttcggccgagaacgagacgggcctctccatcgtcaacagagacaaggtttgcagcaagtctaacgtgggtcgcaatcgtcgtcagcacacacgctctctctctgacacggcccgcgccggactgacgattctggcaaacgtcccggatgataccaaactcgtcaaagtagccacctcgaccttcggtcccgaacggctccttgaacgtgacctggacgttgctgataaagttcttgttgaagctgctctccaaccagacgttgccaaacctcaagagcaagacgttcttgaccatctccttgccgaggtagtgatcgatccggtacgtctcctcctcggaccactgttccttcaacgccgtcatcatttcgcgacacgagtcggtgtccttgccgaacggcttttcgatgatgatcctgttggagccctcggtcgagtaacagttcttcttgagtcccttggcgacgatggtaaagacgctcgggggtagggccatgtaaaacaatcggttggggttcttgacgcctcgctcggattcgaccttttccaactctttcaacagcgcctggaacccggaatcctcgtcgtactgtccggcgacgtaggacgagatcgaggtgaacttttcgagctttttctgatgggcgtccttgtccgattgcgaggcgtcgtcaccgggtcccttgatgttgccgatctgtcgcgagtgaaagtcgtcgtcggtcatctctgcgggtgggacgccgtcaggtcagctaagccgagggccgcgtcaatcgcgatgcacgttgcacctactcgtcctggcatatccgatgatgtgcaagtcgtcgggcaagtggccctccttgaacaggttgaagagggcggggaaggtctgtcgtcgcggcacggtcgcggtacgtcagcagcgaccgcgcgagcgggggtagcggtcggtcgtcgtcgggctcacctttttcttggccaaatcaccggacgccccgaggactgtggtaagggcgtgcaggagatggagtcgagcgtcaaaagatagccgggcatggcatgtccatcggggtgcggtgggggaagaaaacgaggaaatcgaccgcatcagcctcgtgcgactcgtctcgggatacacgtcgcaaagtccaggcgaaacaaggccaaggctgaaaccaggccaaggctgaaaccgaacaaaaagggacgacgagcatgtccggcagacatccgcgagcgtaggaccatgtcatcctcgtcctctgagagaaagaacagggcgcacgtatagtgacacctcaggttcatccctggcgtaggacctggacgcccgatcgaaatcactcggtccgtcccgaggtcgttttccccgggatcgacgacggcgtgacgacaagacccccaaccgcgtctcgtcaggcccacgaattgcccgtctgaccacctcgaacgccccggtgtgctccaagccgagcatgacatccggacatccttttcccccgatcctccccgatctcgccagccagcctgccgatcgaacaggacgacggcgacgacgacgacgaccatctccctttcatcctgtcgtacaactcccaccgtcatcaccatcaccgtcaccaccgtcctatggtcatcgtccgtagtcgcggtccacacccgatgcaccctcctcgctcttggcgtcctcgctagactccaatcaactccaatcgactagactcgactagactagactggactcgtgtgtcggacctcggaccttgcggatcttcttgttcttatttgctgggtatcgtcccgtgatgacctttgctcgtcgcatccgcgggcaaagcttctgctggctcgtcgctcgcccggatgacctatgctcgctgacgctcgcgctgatgtctatactggctcgacgctcgccggaaatggtcatgctcgctatcgctcgcgttgatgtttatgctcgccgacgctcgcgttgatgtctatgctcgctatcgctcgccggagaggattctgctcgcctacgctcgcatcgatgcttatgctcgctatcgctcgctgacgctcgctgacgctcacctacgaccgtggtctctcccttccactctaccccgctctgttccatgctcgggatctttccggcgcctgtatcgagaaaagactcgagtgatttcgagtctgatctttgtcttggggtttgttcgggcatgttcgagggtagtcgggggtcgggtcgtcgggattttctttgtgattgtgaggtggttcgagttgtcgttcgatcgggatgagtttttccctagtcgagtgtgtgtaatctgcttcaaggagagagagactaggccaagggttcgtcggttgaatttcttgttatcgatgtatggaaagagactttgaatgtggtatctctgatgtgactttgcgatggtggtggtggtgaggattcgatggatgacatccgagagtgagtgtgaggtgtgtgtgtgtgtgtgggtgtgaatgagagaaaccacctcgcccctccctcccccctgggggggggggaaatcgatcggtttccaccccttctcttgaacgtccgagcgaggagtgtggacgcaacgagatcctgcgcatcacttttgctttttgcatcgctacacgaggtgctcataactgaagagtgattgagcgagctttttgtgatacgtagcacaggcgcacacccgagtggttcagagaatgatgaaccaggtcgtccgaggtctgtagccgccgactcgaaatgaagtatgggtcactactaacatgactatgtacggtccgacaaagaatcatgagtttgtcctgaaaggcacaaaaagggagcccaatggcctatcaggtccaaccctccgcaaaccccttgccaacccaaatgttcagggttctgctcagtctcctcctgcgatcgcgcctagtaatccctgacctcagcggcgtccacatgcctcatcccgtgtttaagtctaaaccccccggcctgacgttgtggcctcccgcctgctggactatcagctgtgacctcgggttcgatagccacccgcgtccatcggtcgcgtgtccagatggatctcccccgacgaggattggaagcgggatcatccataggaccggtatagtcgtgtgcagcagccgaggcttcatatggttgatgatgggggtcggaatacgactcgtgtctgtgtttcacctggcatcgccgggtaggtctctgcttgggttggaatattgccgtacgagttcgtcgtcggctgcgcttcaacctgagcttgggtgtgagcctgataaccttgatccgctgagggatgataccccctgaatagtcactctgtccaggtcatcacaacgttcacaagtttttagactcatatgacgcacccttgatccggtagatatgcctcttctcccctagtttgtcttccccgacgtgaggatcgacgagggcgagaagccttgtacagatcttgctccgtctggaccttgagagccgagtattccctagccgctagcgacaagaatgatagggtcagcacggaaacgtttcttaaccctcgctttccaagacgaccgcagtcgattacgaacacagaccaagaatactcgactgtagacttaccatcgtccatcctccttaacctttccgcatccctcgcttcctttctccccctcctgacctctttcaacccttctctcaccccctcgacttcccccctcttcaaccccgctccacgtgatctcagcgtacccaagagccacgtcccaggtttaggcaacctgaccgtcggttctgggtggagaaagcgactaggggtgtagctcggacaggcactcgtcagcgggaccaagacgggtccgagtggtggtggggagggggagatggggttcatcgaggacgaagggggcagaggacggtggacctggatatgaggacgggtggataggtaggataggtagggttgtttcgggggtccgggtagtgctacgacaggcggggactatgacaggattgaccggcgacaattccaggtcagaccaagcgataagtcgaaagtccgggaattgaagagaaagacactcacttctagtctagcctcggatctttgccgtcgcagtgagaacattcctctctcctttcgtgaatcttgtggaccccgtccatacccgcccatcggctccggataagaatacccatcctgcccctcctctacctgcttacgcagatcgaacaatcccgctcgtcttcgaggtggtggttgaggactagctgacgggtagagttgcgtttcggggtattcggagctggattgtcgattacccatgttgggcctgattgtaacggccgaatggtgctaagcgagtttgagattggtagaggattaatacgtgtgttcaattagcaaatgcgattaaagttatatatatacgcgatcgggaatggtcgaggatatgacaataagctcaaagtcatacgcgatcatcatagttccttcctttcgtttctttgtttattgtttgatgatcaataaatgacgacaatgatattgaccagagtgatgatgacgtccatactcaacctcattctcgatcatgaaacgcgaaaaggaaacgaaatgtgtgcgcattcaggctgatcaggcgaggtcagacaacaacaaaaaaactgggagcactggacctgagcaccaatgggtcaaccagagtaggttcttgaagggcgaagcattccgtactgacgagacccatgactatcgatgtcgagcacgagtcatcagatgatcgattgatctgatgacacgtcatcctagctagcttttcatcaccggcccaacgcgacgcgacgcgatcaacaactcggaagacgtcaaaacgtctcaacaccaccacttgacagatggatggacacccgttcgcactcgcttgagaccggttgcagaccagatctctagaatacaagcatccaccatgtcagaccctgtaccgcccccagcttcctcctcgagcgcgacctcgacgacgacatttctctcctctgcctacctcggctcgatcccgcgtgactcgatcaacgacctccagtcctttctcgatggtcaggcggccatggagcaagaggccaaagaggccatgccgtttgagacgggagagtgtagctatgacaagggatacgtgaggcagagcgtatgggcttgtcgaggtcagttgcagcaagacagagaatgacgcgggagaagcgaaaaaggctgactgaccacctcttgttataccatcttcctcccgtatcgacatacataccatcattcaatcaaaacacgctattgtcccttagactgcaagggcaaaggcatttgttacggctgttccatctcttgtcacgccgagcacgacctcgtcgagctcttccagcgccgcaagttcaggtgtgactgcccaaccgaaggtcccgcgtccacttcatcgtccgcctccagctctgggataccatcggtatcggcctcagctccgaaatcaacaaaaaccgaatcgacgacgcgatgcactctccagcccgcccagcccaccgcgcccttcccgccgaacacctcgaacgtgtataccaggaactttctcggcaagttctgtcgttgtcctaaaggagaggcatacgacccgatggaagaggaggagagcatggtcgtctgcctgggttgcgaagattggttccacgagggttgtctggtgagtcatatccgtagatcagcgtttgacggtgagatggctgattagggtttgtccctcgcggttggcttcgtgtctggaggagtagaatctgtatgatccttctaaatcaccacctttggatcctgaggatgaaccggaacaatctgctaccgcccccctgacgatgacgacgaccgcgtccaacccttctcttcttcggccagattcttacgctcacgtcatctgtcgggaatgtatagccaaacaccccatcacacgacgtctggcggggactttgggatggatgaccatccttcctcgtcaaatcgacgacaaacaaggtcaagggtcggtagacgcgagggaatggaaagatcaatgggaggtcgtcggggttcttcctgagaaccaggcagccgaacaggtcgaggtcgggccggaggtggaggtgggaatgaaacgcaaagtcgagcaagaagaagggtcgaccgaaagggacgccaagcggtccaaactggatccttcatcgccttccgaagagggcaacatgacgaaatgtctcctccctcccatcgtcgagcgcgcccaacgggcatacggaccttctgcgacggacgggacgtatggcaagggggatgtctttctcgccgagggacagagggaaaagctggcggtctacttgacttgcgggtgtaacgaatgcaaggccgagcatggagcggatcgggcggcaccgttcccccttagcgaggaagaggagggggagctgtacgaacccccgcgggaggcggaagacgaaggtcctgctggtaagtcaggatctctgattcgaccaagaggaaacatccatgctgaccttgtcctgtattggatcccggtggggcacacagagtcgatcgacgacatgacagccaaggcgttgaacggacttcctcgttctcaagcgatcgagacgatgatcaaattcaacgagatgaagtgggtcgagcaagcttcgagattgccaatgcgatacgatccgctgagcccccttgcgtactcagagacaagcttaaagtctttttggaaggtttccgtggtggggacaaggtggtcaaagaggaagatattcggctcttcgtggatggaatgaaggagcaggccgacaagcgatgataaggcgcgtcatgccgatgtgtatgacaagatatactgtactcgaatgctagacatgtagcctataagatcgcctcatacccttctgcgctcaagtctcgctacctccttgcatgctctcgtttgcctgtatggctcgtttgcagctcctgctggtttctagcccatcattttgactactactaatcacatggtcagtctgtcattaccgagagatccaataatgtcaataccctttcacttcacccaattgtacggtccctctttgggtttcatcagcttgttcagaaacctccctgaaagccttgaaattgagcatatcaaggttgacacaaagaaggtcacagttgtctgactgaaacaaagatggtaccagccaagacaaacgattgttttcaatcagtcagcatatcggggaggaataggaagcctagttaatcgagtcttcaaagaaagcgacgcagctaggcgatggcatccttgtcatacaactgcgaataccaagtacaaaggtttcgaagtcacgtgtctcggctgcgcttcctttttcaattacttgtacagcgcgcagagcgcagtcgatggatagtctccgagctggcgaatgatcaatcttcggtctttttgggaacgtttgcttgccctcctgcctgttttcccttttcctcttggggcttatcctctgtcatccagtgctcgtgtctgttcagtagtcatacgtacaggttctaagctggatactcaaaacataccgggatgactagccctactttgcgcatctccaaagtaatccgagtcgttcattgcactgtgatggtattgacggaaagacgaaggacctcgcaagactggagagatgtgaccaaccccgctcccgcgaggcgaggctcgaggcagacagtcgaccacgtaagagtttctatgcccagacacaagcgttccatgtcagacttttcccggcactaagcttttggtacactagacccaccgcagtccggatccggtaggtgtctcgacattgtcgtcttcggctcgttggctactcagtcggatgaaacagagcggtggtcagactcgcgcggaaaatagagtttcgagcgagagacttgccaccgaagattgccttgaaacatcagcgaagaagcgagtctggccgacatgtcgtggatcgacaaaggcgtactggctcgagtagtaggcgggctgaaaggtatcgccctcctctcgacttcctccttgccattgtgcaggtcttgtaaccttcgagtcaggccttcgcccaagggagtgccgatccttttggccggagatgtatgagatctgccaaatggaggcgtctgcgctagcgagttgtagggagtgtgaggttctgtcggagagtttgggaacttgtacatcggggtcagaggccgggacacgccacccttgagagacttgccgtggtaatgttggcttgaagagagagacatgatgctgaccctcttcgagctgccagccctatgagcttcgggacgaattggaatttgcatcttcatcgaagtcggggagttgctggaatgggacggtgtcaagatgatattggacgacaagcatcaagtccaccgccaccggaattgatgggcaggcgagagttgacaggatcagcttatatgctcgtgatcaaggtgtaaccacccgaaacggcccatccgaaatcatcaaaggaagccggatgcgcaaaacatgtcgtcacgagcacgtcttgtaatatctttcatcctgttactcctggcgaggccaaaccaggctattcggctttaccacggatcaacgcggttgaacgattcgatataacgtgatctggcatggtcatcccggctgaattcttgttgattacactgcatttcgtcatgttacccaaaccttgcgacgtctctttacgatcgtatccgcttggcatccggtggataaggcacatctgttccgctcagcgttcccaatacttggcgggcggttgtcaactcggaatgtcgacctggcttggtgtacccaaagctagacacgacgggggtcagtaaaggtcatcggggacttgtaaacgtcgtcgacctacccatccccgtcgtctggattgatccgcttcatacctctcgagctcgaccccccgtcatctgtcgagccacttgtatcacccaccgtatcttgacctagctgagcctggattgcttgtcgtcgtttcgcagccgcatccgtaggcgatggcttcttggatgtggtttccgaagctttgacttcttggggatttccaggctagatagcaaaggcggcaccggtcagctagatgtcgactttcctcacgctgtcggctatgggaccgacctgattctgggggtagacaaaaccgccggccgaatggcctctttgaagactcggtggtgggcccaccgatctaggtcccaccgagcctttgccaatacctgcatccactacagctcccggcggaggagccccgaagccgtccgtccgtacatcatcgtccatcgtttccccctcctggaatccctccattccgacctcttccgcagtcagcaaatctgtgctcgtcatccctacgagcggatcgtcgaccgtatcgtccatggccatgctcgcaaacaaggcgtcgtcctgcgcgtaatactcttccacctcggtcgttgtcggtctgacgatggacatgcccgctgctgctaatgctctggccctcgcttgagcccccgcggctcgagctgccggatctttctgcggtaccacgggtcgactgggtgtaccgttcggtgtcgcgacaggggactgcgcttgaccctgaagtgccgtccgtgctggttgaccgccgttctgattcgtcaatctcgtcggtaaagcaggtttcacaaacccttgttcgtccttgacctgagtggggtggtccagccccgcgttcattggctgttgcgaactcaggtcgttcatcggatgaggtcttgacggccccgcctgtgccgaagcctgaaacgcctcgtcgtactcaggcctcctccacaagtcttccggtctaagcggtttctagagagacccacccaggaatcgagtccatatggaatcagcttctggcctaccctcccactctggcggtcaacttgaactcacaggtatcactttgacctttttgatatcctgcagatatttcttgtcgtacaggcaattcccgaggacgttcccaaacatcctcaacgtccgtttgatcccatccgtcaccgcctccttcttggcctaccaacacccacgccgttcccgatcagtcgtcatgatatctctgtagtcccacctttcggcttgccttgtcgagcgcggaacctttccccttgaggttatcaccccctccataacccgtatcttcgtgaaaagtcccatcccggagggttatcctgatgatcgctgtgatcccgatattataccttccgggcgatgtctcgtcacactgtccgatatcgccagggggccgggccgggtcgatccgtgcggagataagtacaccgccggattaccgcgagacggagtgtttaggacttacaaagtctgtattcagactgatgatctgggaagaccaaccgttgaagccaaagacctcgttggcgaggttgatcgctgtggccgtgggagggcgagcacgattcaagtattcatcacgggggcagaaggaagtggcaaatgaacgagtccatagacagatgagcaagtttagcaaatgatttggttcgcgtaaaggggaagatcagatcagtacggctggtttagtcaagcgcgaggtttttcgaacccgagctggtccctcacctttccatccttcgatatagctacgatgcaatcgaaacgggcatgattcagccctaaacttttcggcttcacgcagcgatccagcatccccatcgctaggcagtactccccgcccgaccgtagcgcctggtctaaggccccctctccccgttgactcacctcaaagcaggccctccccccggccctggcctgttcatgatatactctggtcctaattgtttctgcagcctgctctggagggttgctatctgccctgcggtatactctgacatcctgacgaactgcccttcttgctgtccttgcccctgtgattgtccggttgccgaggcatgagagtaggtgggttgtccttgtgtgaaatccgggtcggctagggcttgatgttcccacgtgttcaagggggatgggggtgggatggcgaatgcgtgggaagggagaggaggttgtctttgcgtgatcgggggtttacgatcttgggtgtgtgcatccatcctcgcggtcgaggtggtcgacgaggtgggattcggattcgctcttgtcgtgctcatcagaggtctcccgtgtgactgattgtagagctcggagacttcaggtttgtactctggttcagccggagaatcccgagtgatgatgtattgcggggtaaaaggttctctcttgacttgatccgggaccgggtaggatcgacgatgagcgtcgagtgcgtgttggtgttcaaacgagtttaccaggtgggtggatagtgccatggtcaaatgcgagccggagttggactaggcggggaacatggtctcggcatcaagatggaggagtggccgtgtgggtcgcgttacgagttgatctgaaggaagtaagagacgggagagagggatgttgatgtggcaatacaaagttgtatcaactgtgtaaaatgtcaaagtgagtcgccatcgatcatgacctgacctctcgagtgttcggaagtaaaatacatccgacatctcgtaaattgacatccgatttacatccgatcagtgatcgaatatgatataacacattcgatggggagttctcgaaatcatttccatgtcgtcaccggaacgacgacctggtcgattcgtatcagaacaggcaggtcattcgtactcgattgattcgataacagccaaactcttagccccgctgtagcaattgcaatcatatcaacgggtccgacattcgactcggccaagatggactaccatcgcctctcatccgataggcctccagcacctgcacaccacgactcgtctgatcgagcgcaagacgagacggatcccctgaccgcttcgaacgacgtctctacgatctcccgcccatccagctcgatcacgctcgatggtctacccgtgaaacatacaaagagggacgattggagtttctggctgttgggcgccgtcatcctcttgtcatggaacggtcagtatcgaccggccgtcgtacacgagtctagctggctgctgctgaattgtgctcttcggcaatcgacataccgggtatagtgttgatctgcacgttgccattattccaggcgctgttaccgcccacgtcgggcttaagacatacgctaccgagctatatcaccacggtctattcgctgggcaactttgtctttctcggattggctcagcgtggggtgggcaaggtgagcgccatcctccttggcatctgcgcactttgatccccaccgactgatggtccctcgtccactcaatctttcagatctctcaatcggaccggcttcgaaagtccatctatgctctcctcttcctgacgaccctcactcccatcttcctttccaccctcttccccaccctcccacccatcccattctttatccttctcatcctcctcaccctctccttttcgttcttgacgtctttcctccaatcatccagtatcgccattgcggcactgcatgggagtaaagagatgctgtgcgtcatgtccgggatgggaggagtcgccgtcttgatcgccgtggtgcaattatacctgggcatcgtctccgtctggggcggggatgaagcgaatcctaccccgcccgacgagcatctccgggcctccctggacacggatacgggaacgggatcggtcgggtcgatgggtgaaggatcgggtgtgaccaacgctcaactaggctcagggatcgggttatgggccatctccatcgtaccgatcttgatgtgcatcttggtcggtaaacggttactctccctcgatcaagcccggtccgcgcaccatcgttcgaaacacccggacgatacccctggggaaccggacgagttgaactcggagtacaatttcgaacatcccggtcgaccctcttcccgtccgtctggacgtgcgggggccgccttcaagcctcttgggtatagggacgacgtcctcactccggggaccgaggaggaagaacgtcagctccggttcgtcgccgaggaggatcaggaggaacgattacgacaatcggcggcgggcaaggggtggagggggatgaaggggatgatctggaagaatagggtcgtctacctcagtatcgcctgggtattcgtcgttaccctcgtgagtacgatacgagacgggggacgcagagcatcctggtcgggcgaagaaacaaggggctgagagtcggtttgtggctgtgcgcgtacatacaggcggtgttccccccgatcacgacgaccatcttgtcggtacacgatcctgtacccaagtttctcgtgccatcgatctttctgccgctgcattttttcatcttcaatcgtgagcgacgtcaagccttctttcatctccgttgacatgctaaccctgtgtctctgtgggtgatgagtctccgactatatcggccggacgtacctccccgcccgtcctggattcctcatcacctcccaccgcaaactcctcctcgcttcgttcggccggaccttcttcatccctctgttcctgctgtgcaacactgggttcagaaaggtgcccctcgtcaactcggacctcgtctacttcgccatcgtcttcgcctttggagcgagtaacggttacatctcgtcattagggatgatcctcgcctcgtcgtcgtcgttgaacccgctgatcaaggagtcggagaaggacgtctcggggtcgttggccgggttttgcctgacggccggcttggcggtgggtagtatggcgagtttcttggtcacctggatcgtcagaggagcgtgagtcgacggtattgcggggttgggccatcgccagagagagggttgcgtttgctgacgtttgctgctggtacaggaacccgttcaccggttgatctcatctggtttggaggcatttcaaagttgtatagattagtgttgattcgatataatacacggcatggtacaacatttcagtttttctttctttcgaatcagggacccagcgtttggctcttgaagaggtccggtaagagacagtccgtggtagttgaatctctctatatacacacgtcgggcggtgtgagggcaatttcctcctgttgtgcctcgcgcaacatcgagatacatgttacaaacgtgcgaatccgtacttatgttgttttgatcgtctatcatgtttcctgttcttgcagtcacttgtgcttgcaatctcctgcgaatctctcacagcggagcgaggtctcgagatgggtagtactggtcgtgattgtgtacgggtgaaacgcgcacggacatcaagccatcatcttggtaaacactactactaagctactaggcctatttttgatgtccgtgatgatctgctcactaaatagtcggtctcatccaccttggccttgaggacatccaagggccttttgagatcagttcgccaattcgccagcagctgatatccactaggcaggtcattccaaagccagatcaattgatatagctctcataagcaaccccctctccgactgtacctcccggacgatagaaacacacggcaggaaacatggccgacgacgaatacgagggtgctgacaaccgaaagtaagtccacctcctaccctcccatccggatcacctcgagtcgaagtagctgacggtccccttcgccttccgcttacagtgattacgaggactttgaagagcctcaggtgagtgcccgggctcagtgttctcgagcttgacttgcctgcgagtggatgctgatctatctccttatcgaccccctcacacttctccttactgttcaaattgtccgctttgatcacggtactaccaggccgacgagatgatggaagaggagggcgacgggttcgaggatcccgatgcgttgaacggggaccagaacatggatggatcgggtgaccgggacgaggacgagggcgaacaaggagtgagtttgacttgagcgggttgtcggcggatctttccgttttcgtctctcgagtaaggagagaaagccgtcgaggatcgttcagagggacgatagcgggccgttgagctttagacaaggcggtcggaaggcaggcgtagcaaggctcctatccggacctgagcctagatcttagcgatccggtctagccccccaacaacctacatctgatccatctctgcaccgcctcctaataatacccctcacctacattcttgagaactctactgactcacgttcatccccacgtcattcaccttcaggcagcgagcgtccggaccggaaagatgacccaggccaacactgtccgcgtgaccacgccttacttgaccaaatacgaacgagcgaggatcttgggaacccgggctctgcagatcaggtacgccatgtcgacaactgttcagcccttgattgggcagacattgacgggtagccgatacgtactcgtcgagctgatcacctacctgtgcgcatgttttcttacggtggttgtagtatgaacgcacccgttttggtccagctcgagggagagacggatcctctcgagattgccaagaaggaactgcggttcggcaagatcccgttggtcatcaggcgttatcttccaggtacgtcggtactagacaatatcgagaggttctcgcttttgaagtgatgctgatgttgctcttaccgttggcaccatgtgcattgatacagacaattcgtacgaagagtggaaggtaggacgaaccaccggctagtctgtgcaacctttctgcgtgctcaatgcctgcttgatcttgctcttttaggtctcggagctcatcgtcaacggagattagatccgctaccccctttacccccaaaacgcccgaccccccaatctcaccacctcttcgtcatcccttacgaccagctagcatatctttcggttctttagtgtttgtgtttcttcctcttgatggatggccaccattccgtcttcatgttgtcacgttattcaacaaagcctttgccatttaaaccgaaacgtctcacagcctgcgcccgtcacacaagactcttgtgactgagcaaccgattctcctgctctgctcgccgatgtagaatcgtgttggtgttgtcgagaacggaccatggtcactttcctgctcgtcctgacctgttaaagccggttggtcgcgcacgcgattcgaatgatcagctgttgctcgccgtgttgaatcgagcgaccctcattcgtctgaagaggtaggctctattcgattcgatactacatacatccaccctgcagctttaaacccgctacggcctgcgcagctcgtcataccctacagactattggtcgctcgagccattcatgcggaatcatgcaacatgacagcatggaagagcggcagcgtaaaggtgggagctcgagatcgagacggaactcttggctggtgactcggctgacgtatcatctcgccgtggttcgaatctcgacgtgcactgcagatctcgtgctggaccttttgaagacgttaccaaggcattatcggtcagagattcatgctgcgctttcagaggggttgagacgagacgtgataggggtaagtctcgacacctggtcccgatgacggaatggtctaaaggctgatacacgatatacctgcattcgctcggacatcagtcgatcccacgagaattggctctgcatatctttggattcctggacattccttctttgcttcgatgcagtctggtgaacaagacctggcagtcgatcgccaatgatcaaggtgagtcgatcccgttgcctatgcaatcgacctcatactcaggctgaaccctcacacccggatcgttccagtcctttggcatggattctgtgaagaacaaggtctcgcggccaatccactcacatcctggcgagatatattcgccgagcgagaaaaagtccttcgagcggaacaggaggatctcgaacgacagacccggagcaagaatggggatgattcgtgggacgacgagattgatcttgacgatgatgcccaagatttcatgcccgtctctgggtatgctggaactagacgggacgtggtcgagagggaacgtccggctgcagatgggacgtttgctttgccagcggtagatcctacccatcggagacgacccagtttccgaaccggacgacagcagagcggattgcccatattcctcttaccagcggaccccatcgcatccgcctcgactctgacagcatcctcggctttcccagcatcgcagtcgccatcgacgaccttccctatcctctctcatctgccggctccctttccccgtccgcaagtcaattataaacacctatacctcgtcaaccaaatcatccgggagcggttcatcaagggcgatcaacgacctaccatcttggatgcagccgtctctctcaaaaacggtggactggacggccatcgcgagggggtctattgcctccaagtggtcaaccgcgaactgtcgatccctatcagtaacaaacaacccgtcagtcctcgtcgttccatcgaaggtccgagccaacccatctcgatcgagggacgagaatgggtgttttccggctcgcgcgatcggacgattcgactgtgggacttgaataccgctagggtcatcaaaatttatcaatcgacccagccggatcagggtcatacagggtccgtcctcaccctgcacgctagagcacacgaaggggagggtggcaagggcaaggggatgcggatgatatcgggaggatcggatggaaagttggtcatctgggacgtcctcaccggggccattgagggcgagatcaaggcgcacgaagatagacagagcgtcttgtcggtccgcttcgacgagaagcggattgtcagctgttccaaaggtcagtctcggctcggttcccgatctgatccgtgtttccgctcgatatggtgactgaaagacgacttttgcaccatcgtagatcgatctatacggacgtatgatgccaagacgctggaaccgctgttgatcattgggggaccctcgccgaacgtcggcgtacaggccgagaaccacctgcttcaagcggacattccgggccctgaagatctcgagggacatcgagctgctgtgaacgcaatcgcgctagtccgagatctgatgtgagttggggcagtttcgattgagggtaaagacgacccaagctgagacatctcggccacgctccagcatatcagcttctggagaccgtacgctacgggtctggtcagcggagaccggggaagaactgacccagatcaatgcgcacaaccgagggatcgctagtctcgatgtcgatctggaaaccgggaccgccgtgacgggtagttccgattgggggattcggctgcatcagctttccgaatggggtttcgatttctcatctcgtcatatcggcgagtccgaaggacaggaagatcgagcgtcgtttgtcaagggcaaaaagacgatcgagcccgaacatccgaacgggctggaattcgtcaccgcgaaacaatgttgtcgggacgggatgcatcactcacgcatggcgagtataggacaagggaccgaggacggcgtgaacgaggatgcggggatgggggccgggacacggtgctacgtctgttctcaccgtggacacaaggagctagtcagatcgctatggttaggggaaaacgtagtgctcagcgggagctatgatcacacgatcaaggtgggtgatccgttcacattgttgctgatagtatgaaggctcacccttggaccgctctggcatcagatatgggatcgcaagacgggcgtgctattgaatgatcttcccaatttacacgccggtcgagtgttcagcgttgttggcgaccgaaccaaggccgttagcaccggtctggatcaagtgagttgattcgggatgaagatcatgtctatcactcaatcacacgatctgatctcccctgtttcccgaatctatagcgaataatcatttgggactttgggtatggtctggataccagttttgtagaaatgtaatcaatagtccgtcaagtattgcttatcgattacccaatgtatcagagtcttcactcatgcacacgagattgtcagaagaccatccgtgcatcctctgccttttctagtagcgacgacctgcagaaacgcagagtatctcatcaaatcgatcatcagtttgttttgtgaaggaagtcagggtgatggtggtaatacttggtccgattcgtaagatacgcggaagcaaatcgagcttaacgatcggcacccctcccccttgttgacctagagtttatgtgttgctgaggtcacaacccgtcttcctgaccttgaacaagtatcgcctcgtacctcgattccaacactgcacttcggaacggtgatcatcatgccgaaattggacaacgctaccaagctgaatggcgtgcggaagctcgccaacgctagcaagagctgctcgacacaggtagatacacgcttgagactgagatcgaaagttgctagctgaatcaacgggtcgatcctcttccagtcattagcatatggaaagtgtattggtgccaactataccgatgtcagtaaaggcatgtgtgcggaagagtttcgggcgttcaaagactgcgtgcaggcaagtcgtcatcagctctgatggcaaaaaggtccgcaaatctgatcgaaatgttatggccttccacatcagaaagcgatgggcaagaaatggtagtcaaagtgtcactagaaacagactgtatcatagcgcaacgaaatggatcggccgaatgcgatacctgactttcgcagcaggaatgaagggagtggctcatagaggactcgacaacagcgtcggaagttggatcccctatgatcgaacgaccagtcttgactcgaaggtaggactctgggcgaatcgtgctgagcaagagaggctttgcaagtgatctcgccaatagcttaaacgagagagattgcgctgattgtgcgacgataaacgtcgatggagtcggcgtaacaccatgacgcttgtcaggaaaatcgtgctcgggcagtctataactgtgatgttgacgaggtatcgacgctcagcagcgtctgttcactcagataccttttgacgagaagtttgctcgcggctccagccttcagatcagattcaccttgatgacgacaatcacaactgccttttccaacctgttcctgcttgcagtacctataatattcacccgaaatcgatcgcgctcgttgcccgctcatatcgtattgctacatgctcatctacagattatgcaacccgcctgtccactcagccatacccgctcaagccagcgcatcggccgggacaacgacgacgcccatggcccagtccgatttgagcttgaacccgtcgagagccttttgcaccgattcggcctgttgcagcgagctgaagagtaccgaggcggatttcgagggggtcgatccggccgggaggaagctgagattttggtagcccgcgtatctaagacgcgatgagcacggcgtgcgtgtcaatcgaggtttcgagagctcgcagtggggcggaaaggtgcttactgttcaaacaggttggcaagcgcttcctgtgtggtctcctgaggcagattcgaagcgagcagtacggtcggtacattgggcacgttgggtctcggtgcatcggctatgtcgaagcgtcatcatgagcaagccatcacgagcaacgagactttgagcctactggcagccggtctctgactgacctggcttgtcctcatcatcctcgtccatctccatctcctgatcatcgtcaccctcgtcgtcgtccacctttctcctcttcctatccccaccctcggcatcctcaccctcaccctcgacgtctccatccctctcccgcttgcctttaccctcctcttcctcctgcctctgttgctccaactcggtgtactcttgctcggcccgggaagccgtgatgatctgattcttcttcttctttgacttgttgctcgccgattccgggtcgtctagcgaagggtcctgttgacgcagggtggctcgggattgtgatttggcataatcgatccgctagagtccgtacaagacgacgagacgatcagctcagctcatccgtagcccgagtgtgcagagggaaatgtaggacgaggacaatgcggcgtgctcaccaacggtcgaccgtagaattcctccccgactagagcccgcatggccgtcgtcgcgctcgtctgctcgtcaaagacgatgaacgcctgacctcgatcgtgatccccctttttggcgacaacgtcgatactgtcgagcgatagcgaggagacgcataccaaggagacgatcaggatcaggatcaactggtcttgcggctactgcttgtgggtcgtctgaaggcggcttacactttcccataaggcgtgaacagggcgtatagctgctgcctcaattctaaacaggcgattcgttcaagcacgggcggatatgcaaaacgacatttcgaagtcagctcatctttccgatcggccggtcgtgcaaagagagcacgggaggagagcgtcgctggacttgccgatctttttgatcttggactcgatgttgttgacgtacaacgtcggacaaggttgattggtctctcgtgacattttgtgagagtcctttttgtgctcaggcgaggttatttaagcggatgatgaactgcggggatggttattggttgttttacgttctaggttgactactcagggtctcgactacgactagattggtacctcgagaatgccgggttccactaggtcatccctgggtccattcgacgattaggtactttttgttttcaaccgaaacgcattggttcgcgatttgattcggcttcattttgatggttgcaagtgcgggtgcgggccaactttatacttccggggcaaggcgggggaactatatcgctcgcgctggctttggcggtattcttgtcgtggcccattcgatcgagggtcactcgtctaacctcgagctgagagaagagatacaagcgagcgatactcgtattgtcaaggaccattgcgccatgtcgcgtcgtggtcggtgtcgttacagcggcaggtctgatcgtcgcgtggtctagccgactaacttgtagcttgtagttagcctcggtctgctgctgtttgatgccttttcgctggctcggaagctgtttctctctttgtgctgtggggggaaatcctagcgaaatgatacggtggtgcatgtagtcgtccataaaatcactcaccattttatcaccatcactgaatcatcaccaactaaagagcctacatagacgtctagactagaataggattcgaaacctccactcgttttgtttatcggaacttccgccatattggttgtccaagtgggaaacgtaaaaacgttgacaagacgctcactctacacactacgggggtcatcacgcaaacacgtccccgacgcgagtagagagtttcatcacttctttttcgtcgcctgaaccatcacatcgtcgacggatcataccaaaaacgacttgaccggcatccccgtccgatagaggagactgggtcctggctgaaacatcgactaccatcgtttggactacttactgtccttatcctggcactggatttcggagacgttccgaccgagatacaatcctgaagaagaacctcgtgtagcgttcaacaggaaagcgactctcctttgaacggcactttcgaccacttcttatatacgaacgaggacctcttccttgttgaagctacccaccaaaaaaaagaaccttacgatgcagtactacgactctgcgctcgaacacctctcgacgatcgacctcgagtctttccgctcgatcctccccgagcctatgcacccgttcgtcctcctctcctaccctatccggtcggaacgctcggcagaggggaattcatcgaccggttcgagatacctgtcgcagcaggagacgggtcaacagcacgttcatgctggaggacagcaacgggtgtttggggatacgcatgcggggtacgacgctggtccgtcttcctcgacgggtgggacgtaccgttcgggctcgacaggtagtggtggtggtggtggtggtggtaggaattgtcaagcccgaccaccttaccattcgtaccaccacgccgcatcacacgcgtcggccgcctcgacgtcgacatccacgttgacatcaacgtcatcgacatcgcacctcccgctttgcgagcccctgacgatcccgcacccttccacccatccgcacaacttgttttacgacaagggaccgaacgacgccttgttcgtcatcttctgggccgtcttctttacgatcctacgggaagccttgatgcgatgggcgtacaggccgttcatacgatggcacctctcccgtctagacgcgcaggagagggaaagggacgatcggtcgagggaacgggaaacgaagcagggggccacagtggcggcatcaccggctgttggtggacgcggggaagagaggttgtcgaaaaaggaacaaaagttgagggatcgggtgattgtgaggtttgccgagcaggcttggacgtgcacttatgcgacggtgttttggagcttgggtttcgtgagtttgattacggcttgccgtggtgatgtgacggcatgctgacgcctgcccgccgtagtacatcctccatctcgtcccgaccaacccgttctcctctcgttacctctggcacaactacccgcacaccccattgagccctcttaccaagttttactacctcgtccagctcgggttctggttccaccagctcttcatcttcaacctcgaggccaggcgcaaggattactatcagatgttgacgcatcatttcgtgacgatcgcgctcgtcatggggagttattgggcgaattatacgagggtgggcacggtcatcttggtcttgatggatttctgtgacatctggttgcccgtgagttcgatttgtcgacgccgatgtcatactgccgtccatctgacgtgctgataccgccaattgtcgccttgtcttgccatccggggcccggcatgcagctcgccaagctctttcgatacctccgactcccgacgatgaccgacctcacctttgtcgtctttctcatctcgtggttgatcacccgtcagatcggtttctcgctcgtcacgctctcgtgcatctttcgcgcccgccacatcttgccctggggttggcacccggaaaagggtcaatacgccaacgcatgggtcatcaacggtttcccggccctgttgatcgtcttgttgatcatgaactgtatttggttctggatggcgtgcaacgtcgcatggagggtcgtcatggggctcggagccgaggatactcggagtgacggggaagagtgagtccgtggccccgagctggtgtcacagacctagtcgctgcggaaagagatccgggactgacccacacccgggggcgtgggggcgtacagtgatatccccgagagcgacgccgagacgagggatggcgtgacgggggacctggtctcctcgaagggccaggacgaggtccaccctgaacgcgcgagggagcatcaacatcagagacaacaacaacagcagcagcagcagcaacaagcggcgtcggcggcagcagcagcaacgacggccaaaaaggaaaaggaaaaggaaacctcctcgcccgtcgtcgtcgaggccgagtcggacgaaaagaggtctctcggggtcaatgggcatgggcatgggcacgtcaagtgtaatgggcgcgtcaacggtgtccgggttcaggcggacgaatagatacatgggcaggcaggcaggcaggtagacgggatgcgatgcgatgcgatgcgacgcgacggttcagcacggcacagcacagcacatcacacagcacaccactgcggcgcaggttaggagggggttctctctgttcaggttttcttccttgtccgggattccaggttgtttcgttgtcttttctctctctttgttttccttgcggcgtttgacgtggtcatgatcggccggacctcgatcgtctgcccgcacgcacgcacgcacgcacgcacgcatatatacaatcatacacacctatccacactaacgcagtcagagttgtgcgcttgggtcgtttacccagattgcagttctcgggggtgggcaggtcgatgtgtctgttccgcggatcgaacgacgtctcgttgtggtcgagtccccgggggatatgcgtttcctacatggtctgtgttcggatgatttgtggatgaaccttggtcttgattcagggttcatccagaagcgagagagagagagagagagagagagagagagagagagagagagagagagagagagagagagagagagagagcgtagagataggcgagagccattgaccatggcggggggagtatcggttataaccgaaatggtcagcagcagcagctagtctagaagcgaggttatgataatgacgagatgatccagggtgatgggctgctgacgctgctgctgcccgctctgccccggaaacaaattctcgtagaagcgatcaagaagcgacaagcgagagagaggctaacgaggtcgggtgggatacggatacgagcatgacatgacccccgacccgaccacctccccctcctcccgcaaatacgccccaggcccggtcgagtatgacagcgtggatgaaatcatgacgttgcgtccgtcctaccctcccccaatgatcaagccaagccactactcaatgatatgcccggacctcccccgacaatcacatggaattgaacagaatagaagctttcgattcattcgccggttccgtttatgactttacactgtcggttgaatgaaagtccacccacgcacttctgtgtacacacacggatcagactggtttgttgttgtcgagctcgagtttgccctcgtgatgaatagtatatagcagagtcgatttaggatgatcaactcgtactttcactgcccacttgatactcttctctcttcaccaactttctgatctactatcccgacgtccaaccacactcgttttacaacaacccccaactctaattcataatgaagttcaccatcgctgccatcgccgctgttgccgcctccatgggcttggtctcggccgctcccgccgtcgagaagaggcagagcgccgtcaccgacgttaccgtcctccaatacgccttgtgagttggcgattgagtcgcgacatgtacaccctcactgacctatcgcgtccgacctataggaccttggagcacttggaagccgctttctacaagcagtacctcgaccagttctcggctgacgactttgtcaacgccggattccccgagtggacccgaggccgaatctcccagatccgagctcacgagcagcagcacgtcgagcttttggctggtgctttgggtgacgctgccaccaaggcttgcacgtgagttctcgtcgcgatcgagtgatgcagaacctaagagacgtgatctgattcgatctcgaccatcctccccgcagctacaagttccccgtcaccgacgccaggtcgttcgtcgaggtcgcttccgtcctcgagtcggtcggtgtctccgcctacttgggagccgcctcttccatcaagacccccgcctacgtcaccgttgccggtaagtttccccacccgtgcacagattcgatcgccacggatgattgacgacacctcctcactcgaccctgcctcaggctcgatcttgtccacggaggccaggcaccaggcctggatctcgtcggccggactccagggtaacggttggtccgttcccgaggacacccccgtctcgttctcgcccgtctacactgccgccctccagttcatcgagagctgccccgagaccaaccccaccttgcccttcacccaattcgccgccttgacctactcgcccgccgatggcagcgtcagctaccccggcatgaaggacggtgactttatcgccatctaccagggattgtccgtcggaacctaccccatcaagaacggcaaggtgtgagtaacaggcgtgtaaccgcggcgaaacgacgaggacccacatactgactcaatgacattgattccatagtgatctccccgtcgtcttcggattcgcttacctcaccgccaccaccgaggctgttgccaccaaggtcggcgacgacaacattgttgctggtcgtgagtttcctgacctggtaatctgttgctcattgctgcgtgctgacgagacatcgtcttcccctgcagccttcatcatcaacaacgtcttcaactcgaagatcgaggctccccccgctcctcagttcgcctcggccgcttaagcgttggcatagagaccacgacttcatcttgagctagacccattttcctcatcaccatttcagactactacggacgttcgtcgacaactttttttaccaaacccctccacccccgatacctcgtttccgtttcgtttgctgtacaatgtagtatcattccacttttacgaccattatgctgtgattcgaaatcgggatgatcatgtcactttttaatctctggctcgggtcttgatagggtcgtggtctaataacgttacggcgcgagcgatacttgccatcgcacttcgggattccattggcgggtcgatcatacaaacatcctgaacgtcccgtcgaaaccttgcttgcaggctcagtctaagctctttaagacgttgggttcgatgatgggctcggtcgacgacacaacattcctgatgattctgttcgtcagacggtcgtcgtcgagacgatcaagggattttgaccaacaaattcattggatccctatccctgcaccaagatacatcgccttgtacgctcacagggctcttgatgccaatcttgaggaagacgctacaggtcacgctcaaagcctactgccgagggctgaaagaacgagatcgaggtctcttcgtggcttctaaaggtgggccgggagcgagtgaaatttctgaacttcctgagtgaaatctctgaacttcctgagtttacaccacgctatactatgatatcattacgaattcattggcagcttccgagaagggtctatggaagggtgtagaccggagtagagcccgttgacagagagaatcgtggcttcggctatcacatctattctcatggggccgactgagcgaaagagagacagagggacagtgtgtgtgcgcagaagtgccgtccaccaaaccagaaagttggctctgtcgaccatccagctccgccgaggctatgaacactgcagtgcaaagtccgccgttatcggcgaggtaaaagcgatcagtagtgtctgagttggttgtgtatgtgtctttcatatcgccatcacgtgacactcgggcgctccatctcgatcgatcgacgggcacgggcacgggcgcgttagtgcaatagcggccataaacgtccaccaggttgactatgagaccttggggtatcgatatcacatatcatcgccatccgcaggctacgtcatggccgtgttgtaagtttggagctggcgagtccatgtacatataggcagcatggacacggcaacgaacaggtgatcatcttgcacctcgcaacatgtctacctccaacccgtctacatccgactcgacccgcaaacgaacccaagcttatcaagtactcaccaccacgtcacatcaaagatggcacccgcacctgtggactacgctcaatctaccgccttagttaccggaggctcgtctggtatcggccaggcgatcgcgaccgaactcgtcgctagaggcgtccagaagatcgtcattgtcgctcacgacaaggaaaagctgaccaaggccgcatccgagctagagcagagcgcatcccagacgatcgaggtcaagacgatcagcctggatctcgctagtcacgatgccgcatctgagatccaacgtcaggtggagggctggggctggaaggtcgacatcctggtcaataacgctggactggccaggaaacaaccgttcgccatgaaggcggagaatgatatttcgctaaggactatcgacgtcatgatccgcaccgtcgtcgacctgtccttgcacttcctcccacccatggtagagcgcgggtcaggtgggatcctcaatgtctgctcgactgcgtgttatcaaccggtaccctttaccaccatgtacgcggccagcaaggctttcatgttgtcatggtcccaggggatcagggaggagaacatcgacacgggcgtcagggtcgccatgatcgtccccggcattacgtcgaccaacctcgatggagatggacacggagaacgacggggagcgctcgatgccgtcgggatcgaccagcccgagaccgtcgccaaggccgccgtcgatgcctacgaggcgaatgccgcgcaacagattgtcggcacgaacaactggttgatgcaggccgcgttgcatctcgtccccgattcgatcaaggcgagcatgatcaactcggcacggggcaagccagaggaatcggacgacatcggtgcttccggtgagtcgcaattgcggtcggctgcttacttatgtgtcgctgaaggttgaccgtctttgattgtagaagagaagaaggattgagtcgagtcgcgatgggttgaggccagcgaccccgatgaaacaagccgtgccaattgaagtctttgcgagattgtctcgctcctcgaacgtaattatatgttattagataccccaagcccaacgacgatcatcttcaggaacgtcttgcggcggattggtttcggcccagtatacggccctgagcacaatgccctaagcacaatgctcgcgggatagaaggccgaacgtcgcccttagccatcgacctgtaccggctacgggcacgttcggtcgctctcacatattaccctatgcggctgtgcaaacttgagcttgagcaaaggaggacctggagtcttgaacggcaaattcaccctgtgagctataactgaatagcatcgcgacaattctttcgagtggagaatacaatggcgtggagtgaataagtccagtccctctccagcagcgactttggtaggctgtgattatgccgattggaaagtcggtctccgaaaaggaacaaggcatgaaagtgagagcaagtcgttagagaaacttctggatgtataccagggagcacaagagggtgaatgctttaaggatcgatagattgaataagaggcccattcgatgccggacaaccttgatctagctgtctataactattaagctattacgtactaccactactactagtcaattctcgcccgtcgatgacacaatttgaattgctatatcgctgtgcatccgtcatcgctatttctcacagatctcgggtcgcccatgcactccgagtcttatcctggcatttacggtagttcgcaaggtcgacacggacccgaatgtgacatatcgttgcccccttccgctcgtctcgctcgtgtaacaacgcgctcgtaaggtcgactaacccaacggtcaacccataaagtttcgctcgtaagcccgtatcagatatcagatcgatatcgttaattcatatttgcacagctcgatggccatataagggtaaccccataagacaggtcaccttgcactccagctcatctcgagcgcttgatcctagatcgaagagcaggccatgtaagtgtcgaagtgtcgcatcgaaactcttatcgactcaccggaatggaatccaagatcacccccgacatcgccgagaaaggcaacgacgcactcgagtcgacgtcgagcagtaacatccgacgacctaaacagcgagagaaaaggtcccaactaccaggaccgctatggattctctcctttgcaccgccattccctcgcatttctcgtgatcccgtcggggcgatcacgcatccttataccctctacatcataggcatcctcaccgctctcatcgccggcgtaggcttgcccgctttcgatatcctgtacggttactggactacgggtatcaccgattatagtagcacaaacgatgccatctatgctcgtggacaacatgctggctggctcatgaccgtcgtagcgttcgtcaccctcttctcctacatcgcctttctgagctgctgtgagtatgaatttgcaacgacatgtcccttgaagctgatcgccggtcatccgctcactgctcttgtccgctactatttgtctacaggctcgctcgctggcctcaagctcgccaacgaacttcgatcggcttatttcgagtcgatcctcggacaggatgtagccttttttgatcacgtcggagctggcgaagtcgcagctcggtccagcaaggacatctctctcatccgtgtcggattcggcgaacgtgtgggttacatcacgagcaatatcgccgtcatgatcgccgtgagtttccatcgacccaatgtcgtctcagggtgaagatggacgctgatctatgcaggaagctgtcccgatcctaggcactggtctcgagcttcattcaatcgccaaagctcgccggtattcttttcgctctgatacctttcacgatcatcatgtttggcctcctcggctggtggtaccgctcgaagaccctggcgcaggatcaacttgaaggcaccacctcgacggctgtcgaacagctcgtatcggcgtcgcggatcgtacagtcatttggcatcggcaatcgactgctcgccaagctcgaaagcgaatcgttcaagccgctacgtcgctttggaatgatcacggcgagcgggaaagctctggagcagaccgcggcgttcttcatcatctttatcgcctattcgttgtgtttctgggcaggatccatcgtggtcgccgaggggaccgaagttggacatgtcttaacggtgagttgagcggacactcttgggcaaaagcctcggacgcgagacgctggctaccgatactgtgttgactgacctcgtgaccatttcgttataataggcactcttcaacatgatcaacgtcctcttcgctttcgccatgagcattcctcatatcactgggataatcgaggcgaacggcgcgctcaacgctatccgcaaacagatcgagagggatcccgtcatcgatatcactgacacgagtgggctcgaactcaaggattcgcaggattggcaaccctcttttgctctcgaccaggtcacgttcgcctacccaactcggcccaatgtcaaggctttggatgcggtcacgttggaatgtcctgctgggaaatttaccgccatagtcgggccgtccgggtccgggaagagcaccgtggcatccctcttgctcagggagtacgacccggaaaccgcaaacctagtgcgggacattgacattgacatcaaacaacatttcgagcagcaagacgaggccagcaaaaaggacgatcacaagaagcacaagaaggaccacagcgaccagccaaagtcgcgggcagatacaccagagggcgaccgcgtgcagggtgctggtcgcgtcacctttgcggggcatgacttgagggcgctcaaattacgctggcttagaaggcaggtcgccgtagtatcccagaatcctcaactctttgccggctctatcctggacaatgtcgctagtggcctcagtggtacccgtctggaataccgacccgactcgatcacaacggatctgctcgtcgaaattcgcgaacgctgcgaggaggcgctgaaaaaggctcaagcttgggaattcgtgcgcgaactcgccaatggcatagacgaggtcatcctcgggggcaggaccggagtcttgtctgggggacagctgcaacgggtagccttggcacgcgcgtttgtgagccgtccacggtgcttgctgctcgacgaagcgacgtcggccgtagcctctgacgccgagctcaagatcaccgacatcctgctagaggagcagaggacgcgaggtctgacgttgattgtcgtcgctcatcggctatcgagtatcgctcaagccgacaatattatcgtcatgaccaaaggaaaggtggtcaaccagggcacctacgagcagctcatagatccgagcaatgtggaacagacctttctcaatatggtcaacgctaagcaatccaaagccgccaagaagccacatcagtcggaagttgcgacccttactgagaatgaaccaatatcgatgaagcgccaattcgacaggtcgacgtctactccagcagaggacttggttaccgtcctgggaccaccactgcgcaaatccaaggcgatctttgggatgaacaaatggttgctcctcgtgggaaccgtatcctcggctctgggtggagcggcctttgtcgtctccggctggctgacggggagcgctgtcgcaagtttgtccatacccaatgacaacagcaggatgaggagcgagatgaatcgctggtcgctatactttttcatcctagcactcggtgtcctcgtattgttcttcataggtgcctggacgctagaatgggcgggtatggagatcaagtacggcctcaagaaagagtccttgcgggccatcctaaggcaagacacggcgttctttgaaaccgaccaaggtggaagtggcacactcacctcgggcgtagctgagtttccatcagccgtcgggcagacggtcggagtcatctggttacaaatcgtcgtcgcactggcaaacctggtaggatcttttgtgctcgggtttgtactatcgtggcgggttgcgattatcgggttccccgccattttcttggccattgtcgccggatacttcaatttcacgtggctagaagaatttgaagcattggtcaccaaggaagcagaaaaaaggtccaaccacatcagcgaagccgtcaactctatacgtacaatcgctagtcttacaagggagggagaggtcttgcggcgcttcaaggcggccgacgctcgtcctcgtcaacaacgactcgctctcctgcttggatcggtcggatttggtatagcacagggttcgacattcctctttggagcattcgtgttttggtggggtgctaggttgatatcgcgatccgaagtggtgggtcgaccgctcttcttggcgtctcgcaggccttatacttatggtcattcctattgccgtgtcatttcacgtagaccatcaaggaactgttcgcaacaacagaggcaatcatggtagcggcaatgacttctgggcgcattctcacgttcgttggcgatgtcagccgcacgtcaaacgcgctcaaatcgatccaggcaagtcatccgtgctctggcagctgtctacagcactaacaatgcggatcgctctcatcgaacagaaatggctcgatctggaacctgctcatattcgggctaccgaaacgattcgccaggcctctgattccggcagcgatcccaagacgatacccaatgatcataccattgcattgtgagttgcaaagctgttcggaacgggcccattgctaaagcgttttcaacgggccgtcacagccgcaacgtagatctccgttacccctctcgtcccgatgccttagccatttgcgacctttctcttactttccagcccggagtgcactacgctttttgcggtgcttctggtagtggcaaaagcaggtccgtacgcggatgcaccatcatcgacaagtagagcctatgctgacaagtatgcatacagtgtgttggcactgttgcaacgattctatgaacccaccgcgggcgagatcacggtcggtggcattgacatcaggtcgatcgacatggatatcgtgcggggtatgatgggttatgtcagccaagaagccgtgttgttcccggggacgattcgcttcaatctcactgtgagcctttgatcttggtcaagacactcggcgcaatttctgagtcggattcttgctagctcggagccaaagaccccgagaatgtttctcaagaggagctcgaatatgcttgcaaacaggcttggtcagtttattggtcattgtggtcccgcgcgtgaacatgcgatattgatcgattacggtctcaaagcattttgcaattcatacaagacctcgagaaaggcttcgatacggatcttggtatcacagcaagccagctcagcggcgggcagcggcaacgtctgtgtattgcgcgtgccctgttgcggaagccaaagctattgttgctggacggtgagtactggacgcctcgcagtctgcccaaatgttcccaagctcaatctttcactcgtccaaccgctgctatagaggctacgagcgcactggacaacgagagtcaagctgaaattcaagaggcgatgaacctgatctcggcccgtgtccatgccccgaccatcatcacggtggcacatcgcctctcgacgattcgaaacgctgatgtcatccacgtcatggaaagcgggggaatcgttgagagcggaacccacgaagaattggtcgagaagaatggcagatattggcacctgatagaatcacaggtgtagtcagatcgagttccgaggatatcgatcgtcttttgttgtaaaacccgtggtacccgattataatagcgtgtaacggatattggtcctgcgccacaagactgatcggcgggaccgaaccgcgccttccatgcagttcgggggctggcctctaaagaggtctttggcacggctctctcctgggttcctacgggtcgaggccaaaagcgtcgcctgcttggaggagcgaaggcctgtcatctcgcgtgagcgatgtcgaaatcatgagcccaggatgatgccaatgtagccctcggtatgccgagtcacctggctcttgaaagcgcaaggcaggtttctcgagatgaaatgaccggataacgatgtaaggccacgcatgggcaaggctctttccctattgtggcatcgtttgcttcaatctgtggtttcccactgttcccagccaaaggggtccaagccatcgcttccttgagcgccgaaggaccgctcaaacaatagcatgatggggtcatcctgcatcgcgctcagagcaacttcttctgccgcattcatggctgtcgggtccatcggatagataggtggtgcgatatccattgcgggaagctgcagagctgtttgcgatcgcataaaaggatcacgtgagtttgcgttcacaagcaagtatatcctggctaactcacacatggcttgagcaatcacctcgatcttacgtctcgcatcgacagcctcggcccgtcgggtcgaagtcaggtccaagaggtacaaggcgatgcacaggtgttgctcggcctcacccttttcaagctcgtaccgccagaagcaaagcaagacgagatgggcgcatgtcacgattcggcggtagtgcgtccagacgaaattatacgaggcagtcgtgtaaagattcctgtacttgctgagtatatgtatagcgccacgagcgagtccagcccaggaagagcacgagagacgatcgtcgcggacgcaagctgaccagagcatgatcctgtccctgcagaggtaaatggccacagtcagcgaccgtaggttcacgagggcggacgtggtgcgtaccactgccaatggacggcgacgaacgcatctacgatggcattccctgtggtgcgctggtcttgaatgaaggctgtaacccagcgggcccacttggcctgggtcgtcataagccaatcgaacggaagctgatcgatggaaacatcgtagatggtcttttgtatctcgctctgcaacaagaccaactcggcgagcgagtgtcgtggaaccaaaccgtttggcgccgcagcggcttccttgggcctcgcgtggataaaggccgtgtcgaactctccatatttcagcagaggttctttgccgcacagagacgcatactgtctacaatcgcagaggtttcggccgtcagtcaagacgtcgaaaagcgagtcgggtctgatttgagactcacccgtccaggaaaagcacgagaaagaacattaaatccgcacggtctccaggcgagtacgcttcggcggtatgagctcgatgaattcccagttcgcgtgcctgcgaaatcatccacgagatgatatgtcgtgttgatgtcggagtggacgtgcacattgagtaaaattgcaacaagctgagggcctctgagtacaccgtcacgagactgtgagtaaagagcggtcataatcggtgacccattcttatgtactcacgaagcgagatgaaggatacgctcccccatacttgcaaacgttcgatagcgtgccggaaaaaggcgacgtcttccctcggatcatcttcagcaatggaattgggtaaaaggcgacccagatcgtcggacatgtggaagctcttgagtctcaatagtccgagggcgaggcaggcgtatacgagggcgaccaagtcgggtgagagcgaacggggaagatcggtgtatcgttgatacaggtccatggatcgagcttcagtcagatagctgcaaaaggccagcatgtgtcggttgaatgcgatgattgcttgtaatccgtaatctgggtcgagcggcgggagcggtggaagcggactctcgagcgacatggacgggtgattctccatctctttcaggacgagctcgatatccagacctgtctcttagcaattagctgggatcgttcgccgacggcttctcacttctcaccggtaatctgtctgtacaccgtctccagatcttgctcgatcaacctgatgaaccccgtccgatcgttataggtggatcctctgaccacgctatccctcaatgggcgttcatggcctgacgcccgggacacggtgcgagacccttctgtgacctttcgtggtgtctcgggggtcgtcacgtaggaagattctactctggttcgcttcttgccgttgtcgtcgggcgacttggaacgatattgtccatctcgtctcgctctgtgaatgttgtcgttgcaggtgtactcagcgaagttgttcgtaacggagacttgaaaaacgacgtggaaattctctgcccacctcttcggtcttgctttgtccctgactgtacagtctcccagatccatcgctcggcaattgacacaaggatacggaggtacgcatttgatcctccgagtcctgcagttctcgcacgcccgagcgattcgggtaggacgagagccactgccactagcggctcctgcatcgctcatgtcatccagagatgcggccgacgactcgtttctcagcgtcgtaaagttgtgctgtcttttagttatcttgagcaagtttcgccgatgcacggcgaagcggacatgctttgacgatctgccaagaggtagggttttgttcgatgtcggggattcttgttatatgataagctacttggaggatcagactatcaggaccatggacaagcaggcaggcgggaggctcgcacgagcaattgtcacaatattgctacaagccgagattgagatatgcactttgccccgctctcggtcgttcaacgccgaggtcgactcgccgaggtcagttggctggtttcctcgtgagaaagacggttgccatatcgaccagagtcattgcaatatggtacatcggccacatgccacatgatataatgtatctctcatacctctgtgccagtatatacagcatctaatggtctacggaacctgatccatcgcttgaccggtgatcctcctcgttatcgtcgttgccgctacaacacccactcgagggcaatgaagatcgcgggtagacgtcgtagactttgcgaatccgatccagcagctcgtcccggccacacgctttcatctcggcttcccacgatgacctaacgtcgtcccggaattgctcgtcgatgacgactcgtgctccgacagcagcgatcgacaaggcgacctttttggttgcacggatcgaggagtcgagattggtgatcccagcgtatgaaccggagtctacagatggcacatcgtcagcgagacagtcgtggtacggtcttgaggctcttgctactcacgaggaaagtcttccggacccgcttctggtagattaaacattggatgcaaggcgggaagatggtagctcacgtccccctgaatgcaaggcggaatatccagtaattcagcttgccatgcacggttatatgccatgaatcaatcgatgctcacgaaatcggtactagctcccacaaagtcccgtggtttgacctcgtattcaccgtccttgtcgtcccgatgcatatcctttgaaacctcgttgaaatacgtctcgagtcccgcggccggtcggacgtccatgtacatgtgatccctctcgatttcaatctcgcatcctgtggccagagcagccgccttgaagcaattcaagaatcgagggatgagggcgacaacttcggccgacgacggtgctcgtacggcgtagatcatttccgcttcactggcaatgactgaagggtgtacatggtgagcctttcatcaaggagagtatcgacgtcaggcctcgactcttaccgttaggagaccactgatcacaacccttgatcgtaccatgcatcctgaccttgtcggcggtctgctgtctcaacattgagatgttgacgtaggcaccgaccgcagcgtccaaggcgttgattcccttttcgggagcgccctgtcaagtgacagcaagtcagatgacatggtcgaggtagtcaagataacaccaatctcaatgctcactgccgcatgcgcactggatcccttaaacttgatgcggaacccggccagacaattggtcgtggctaccatggcgccgttgccatgagtgccaggatggaccctggagcaagaatcgtcgccacatgtcagtttaaccctattcgtcgagcagcaaggtggacccacatcagacatgcctccatatcgtcgtatgcaccgcgttccaacatgacacacttgccacctccgccttcttccgctggagttcccaacaaaacgactcgaccagcgatatcccgtcgttcgaggagtctagctgtggcgatagcagcagcacagccggccatagcgatcaggttgtgcccacatgcatgacctaggccttgtagggcgtccactatgacagtcgcggagagtaataggtcagctgtcgatgcagacagatgactggataggccgactcactctccgaattgaaaccgatggtcttgccgccttgtcccacttgcagctcagccgaccaggcagtctcgagtccgaaagcatgacgtgtgaccttgaaaccgtgcgattgcatcaattcggtacatcgatcgtgggcatagtgctccttccagccgagctcgggatgtgcgtgaatatccagagccagccgagataggtcctctttgatttcgtcgacgtattgaccgagatctttgagcaaggctggcgcaagaccgccgccgtcgttgttattcaggagcatttcgggcatctcgaatggtttgtagttgaagtgacgacttccgggcatgatacatgtcgatcagggtcggccgtttcaatcctggtgacctctgtttatatgtttcatcccgacgtccgccggcaaacttgcctcgcagcgatgacggaggcgctcgatgtctatcctcgccagccaggataagtcagctgatcgtatctccatttgagcagaatgtctctcgacgccgggcaagaaggacgggaagatagaggacggatatgtaacactcgtgacggtgttgagtgatcgcgtatatccgttttcacctttcttcgtatatccggttcaacatccaggtcaactatgaccccgtttgcggggctcatccgaccttgaaccccgctcctatctggttcacatcacactcgagagcgacatatcgtatcgtagcttcgtaagggatatccagctatcgcaatgacagatcgagataaagcacacgaagatataagcagcctgattcgggatggcatccgtatcacctcggaggagcccaggggctttgataaatcctggtagccaacttgccgcatttcaataatcaccacaactactaccataagcaggactgacaacaacatggcattcaatatcaacctcgacaaggagcatgacgaaaaggctcagcccgagttgacagtaacggcagtagaggagcccgactttgatcagctcaaggaagaccctacctacccggtcgacctgttcttgacagccgaacaagatgcaaggatcaggcgcaaggtcgacttgaacctcatgccgctgctatgtgttgtgtatggactgcaattcgtgagtcgaatccacatgtatggcttgagcataacctggtgactcacatcgtatacgacttgacatcggtcgacagctggataagatctgcatctcgtacgcctcgatcatgggtttacgggaagacctcggcctttcgctctcccagtactcgtggttgagcagcatcttctgtaagttgtagagtcgtgccagtgctcaagatctctcgactgtgctgacacatcacgcttctagacatcggatacctggttggagaataccccatggtctacctcttgcagagactgcctttatccaagtttaccggatgctgtatttttgtttggggcgggattctctgttgcatggctgcatgtaccgactttaagggcgccttggtggtgcgattgtgagtcgcccgtaggtcgtttttcgattcggcgttgatcgttctcaaatctcgccccgtcgctctcctcttcagcttccttggctttttcgagagcatgatcacaccctccatgacgacttgtaccgctcagtggtacaagatcagggagcagggaacgaggaccggtatctgggcttcgtgcaacgcctttgcgggtgtcatcggaggaggagtcgcatacggtcagtgaaggtcgagcccatgtctaccgaatcgaaacgcggcttatccaaagagtttgttgtctcgtaggtctggccaaggcagatgccggtggaggcctgtcgattccaggatggcaggtcatctttatcctccttggatcggtcacggctgggctaggagtcgtcgtattctttttccgtgagtcggcatcgtgcggcgaaacaaacccgttcgagcttgtgggctaacttttttccggcggtgtggccgttcatcgccatcacagtacccgactcccccatgaccgctcgcttcttgacggccgaggaaaaacccatggcactcgagcgggttcgagcgaatcagcagggacaacgcgtacgagagttcaagaagtatcaggttatcgaagcattgaccgatcctttggtgagtaatactgtatacgaacactgaaaatggcagttgctcatggaccctctctgtagacctggctctacgccatctttgccgccgtcatcaccatccctaacggtggagtgaccaactttttctccattctgattcgcggtctcggtttcagcacactcgactctttactgctcggaatgcccggaaacgctatcgtcggattgttcgttgtcggaacgctgtacatcggagaccgtttcaagaaacgaattccgagcgccatcccggcgttgctcttttcgattgccggaaccagcttgatgtggggattacccgatcaatatcgcatcggtagattgatcggttactatttgtgagtacagctcgtcgagtacagctcgtcgagtttatggatggtgcaaatgctcatttctggcaccgcccctcttttagcgtctcgacctgcacgccggcctttttcgtgggactatcgcttgtcacttcaaacgtcgccgggcagaccaagaagagcactgtcagcgcgatctatctcattttctgtgagttgacagaaaggccgcggtcgtgatgtcgcggcggctgaccccagacaatcctcttccgcctagactgcgtgggcaacctgattggaccccagacgttccaagcaaaggatggcccgaggtactcgcccgctcttgcgacggtcgtggcatgcgtcgcaacagccttgttgctactgctttgcatctgggccgtctatcgcaaggaaaatcgtcggcgcgaggtattgtgcgcgcagcctggtttccaggcgcccgagcgatacgagtttgccgacttgaccgacagggagaacctcatgttcagatatgccatctagcagggtctatggtacaagtttctgatgcaaaactaaattgtatacaaaataaaactgagactagaaatttgtaccttgcacgttccagaagtacaacaaaccttgaccaacgcaagtgtcactaggccagtgccagcggactctcgtcagagagccgcaggtctgaagctctcaaaagtattcaatgcggtcgaactgtcgccgtgatggtcagccgtgtgcgcaccaatactggactcgtcatccatggtacgacgattcagcccaacacgataaggtaggatctcatgttcctgcgaacttggagaattttgtatcgcaagttcgacagcaagtatactctgaacctgaagcacttacctctcggacggtcgttgtgtcgactttgatttggtccagttttgaattagttgggtctttgctcagcgtactcacaacgaacgttccatcctatcatgaattctctcccgtgatcagccgatatcgataggatggtactccttgtcaagcttactgtttcggctgaaactcccctcgcttgaaatcccctttgcaagtcgagccgggaattgaggacggcgaggaaaggcaacacgtaaagtttcggatagaaaatctcccagaacaacatgaagaggttatcgctgccagctatggcataattcatcataaaggctacggcagcgagcgtggccgccaaggacgattcgacagtgatcctgatggaatgagcgaattggcctgtgagaccgggtcaggcgtctgtcgaacttagtggactaagcttacattacgagtttattgataagccgagacgtctcgatataacccgtcttgctcttcagtagcccgtagatgatgaaaccggtcaaacacaagtcggtatacagcgtcgctgtaagctgcaagggcaagagccgttggcagggtgcacaaccatgaagcgagctcataaaatcatggactgacccagaggtagacgacgactttggtcgcctggattagacgaaggtcaatgccgtcctcctgaagattgaacacgccgcggtgctgacctcgacctgatcaaaaccggacgtgttggcggtgatcacagccacggcgatggaggccgaaaattgacagcacattccgacaatgatagcggcaggtaaccagtagttcttgcccatcagtcggaacgctcgttcggcatagaatgcctgtcaaggaaagggcaactcgtcagcatgatcgtgacgggaacattgtccaactgtcttacgtacctgaaccgggatcaccgtgaccgtgtcaaagatggcccaccaaccgacccctggatgagcacacagcttgagccaatgatttccatagagcaatcatcacgacccacacttagccatgatgaacgggctccatttgccaaagttctcttggaaatggaacaggatcaagcgaatattgtagccggtacaggctgttgcagcggcgatgacccagaactaaacggcggacgagatcaattgtttggtcgagtcgacgatgtgcgcgagggtgccagtcagctaggcccaacacgttgtccagggaactctcccttcatggatcccctgtcgactcaccaggatgactttgacatgtaatcgctctctcggcacgtagttgagccaatatcccagcatcaccagcatcatcccgaacaaagccgcgtcgagaccgaaaccgagtaagaatcctcccaggttaaggaaagagtgttttgagagctctgccttgagaattggctcgagaaactctggggagagtccggcggggagtgcggacatcatcagggactaggacggaagagcaggggtttggtatcgatgggaccggccaatgggtgatggtatatctttgcatagaccgctgatctagtccgagtgaatcagatgatcgagccatcgtctcctctcctagctcgataggttatataggtcttgcatcaacggggattcggcgacgagcaattggaccgggcagacgaaaggcatcgtcagccaaagccagcgtcctttcccatcacgtcaagaagtccctttgttgtgttacagatatgtggatgatcccttgagcgtcgacgctgcgagcagaccatcgaagctttcgcctcgagatctgcttcttcgcgaggccggttgatcgtgattttgccgaactgcgttgcaaggccatcggaggtgacggtagccaaccgtttcatcgtaaaaaggccggagcaaggattttcattcacccacggaatcgtggctcgagatcgtgtctcatgatagttggcgacgacagcgacaaggggcaatgggaaactgattattagaatgatcatcgatctctggcgatttgcgacaccgaccgtaccacgacgacgatctcggagggtttttcggcgcgtcaaacagccgcaaatgactttttcagatcgccgatcgccgagatccacaatggatcccacgaactgagagctggaatcatgcggcgaaatgcgcgatggacgtttcagttgtgatcatacctgatggccacgagcgatagtagagctagctttgatgtgccgaagactccaaagaatctagcattcacgcgtagctcactgtcatttccgattgcgcagctcaaagtcgcccatcgagtgcgagattcccgctcttgggaagagtccctgttctgtctccgaagcgtagtccaggaaatccgctcaagttcgctcgagcggatttctaatcaaggcttgtgatggaagcattggcgacagagtcgatcagccaaatcgggtggtacgaaatacttcttttgacaggaacactgtagcttggctccgacgtgctacgctgcctgtgcatccgcggcgttgaagaatctcctttgagggcagaaaatacgtagaatggcctcgcggggtcaactgatggcatgcctcggaggcggctaccaagtgccttcttccgggcccgccaattccactcaatcgctacttggaggctaccaagctcgatcgaactgagatgtccggagaaagatagtttggttgcgcgtcgaaagcaatcgagacgatcagacgagacacgtaccgctgacaagccacgcgggatcaccggcgcggtacggaatgtggccaatcgatattctccgacccgatccggtatctcacgccggacttttgcttagcgttctcatgtcgataggggctccaacctcctagctggctctcattggtcttgaatccttcgcagaacagagtcaatagtcgtgcacatgtcatagagtcgcacgagtctgagcgcttctcgcgggacgagcccgggcaaaagatcatgtccacaccgtggtctcgccagtcgatcggcccattcgtggcgacggccgcggagactcaccattcagccacatcgcctgtaacgcctagtcaaagaaccacaggagattacctttgcctccagaatatcgtcgtctaaaagttggcagagcgctgtggccggcatccgaaccttgatgttgttgattgggactcacgcacccggaaccgttatcgccgtgattagtccccacgatagcgaagaagctcgttcgtgggagcggcgaccgaacgagtaacgaacaaggttggtgtatgactgagcgtcttcctgacagtgttctgtgcccacagaatttcccgtgcttgcctggaatgtccctatcaggtcgaccggcctgccacgcggtatgtgacacgcggaatgtggaccaaaatctccgccggcgcccagggccgggtagaaacggtcacaaactcgacgactcatcagagacattattatagatgccgctcaaacctagttacaggtcgtgttctcggatccaacggtaccacggctgatcgcacaacatcgttggctggacgactttttcggcgcaccacatgaatataaaagctcgctgctacaatagttattgagtggatctttttgatcaattcatcgcaatatctaccacacacactcacatcctcgttgcattaccccagtcgaccaccatgaagtacgctaccctctccagcctctccctagtctcttcaacgatccttatggcccaggccgcgccgggacgacgaagcgcaatcctaacctcgggtgagcgcaaggtcatttcgcagcagctctatggatccatcgagaagcgcgggctcgatctggctgttcctacacccgacaatgcgcactggaacgctattgtcaagcaagccggctccgaccttgtcatactttgtcgtgagattgtgcccaacgaggtccaggtcgctaccggtaagtgtcacgctctcagcgactggtcaaaaatacccttcgagtctgacctcggttcgctagcatctgctaccatctacacgccggtcacggtgaccgagacgatccgagccaccgtcgaccagacggacaatgtggtcgtgaccgagatcgctcgcgagacgacctccattaccgtccaagccaacgctcaagtgactcaaacggaaaccgtcatcgaggcgacgactgtgaccgagactaccgacatcggacccacggccaccattacatcttacactcaggtcggtctccgtttcttttcccgacctcctcttgttgagctttgagctgactactggttcgcaacctcccgctagggcgtaccgcaaggggctccggccaagcgtgccttgatcccaggaactcgggttctgttccgcaagctgtatgagatcaacccggcattcgtaattgcgaaatgcaatgctttgttccctccagtaactcgaaagtcgaggaagtgcattgggcggaaagagctgacaatccgcttcgaacaggccaagactacggtcacatctaccgtcgtcaagtaagtcacaaggctgtcgaacttgctgcctcagtcgctatgtctaatgatcatgacgtggtctctagaactctgcccacccagtccttggcgactcaacacgtgaccgatattaatcacgtccaggttaccgagaccgcgcacgagactgccattgagacagtactcgcaaccgagaccttgacggaaactattcccgccactaccaccgtcaccgaggtcgccaaggccaccgagactgtcggatcgatcgtctatgagaccaagtgctcccagtacacctgctggccggtcgagcttaccgggggtggggattggaaattggtccccggatcggttttcccgaagtgcaggtgaggcctagtcaagcgccatacgagacaagtagctgatagtgtcgagcttttttattctcataggtacgagccgttccctggcgcgttcaacagcgactctagcgaacacggcaactgctactataatgtgagcctctatcacgacgctctggcaaagtttgacgtgcgctgaaccctcatcacatagcccaatactggtgtcatcgtcaatgatttcgacgacgggttctgtcctttggttccgtcgacattcgcctgctgataaaacggccctagtcggtgtcagcgatcatggtctttattttggttcttttttgggttagggtttgtcgactgtggaatgtatagggattagtcaaatatgagatcgcttttgttctgcatcaggtctaccttcctgtcggtctaccttcctgtcagtctaccttccttaggggttaggggttaggggatttcgcccctggcccacccaccccctggaaatcgcatcgccgagctagttacagtcatcctcgaggctcaagggcgagggcgccagaccgacagcccgcctttcggcagatctactctactctacggttgtttccaaaagcatttcccttctatgtggcgtcgttttttcgcgtcgaaacccggggcaagcctggcaagcctggcagcagtgacagcagcgataatccgggaggaaaaccccggaggcgttccggcagaaagctacgacaacccgacagatgatccgcgaaaacactccacgctccccccggctcacaacaacaacaacaacaacaaccatccttcccggctccggtcctttccacatcgaaacccttgcctttggtcgaggtcgatgcgtcgtcgtgtttgcaggctcataggctctcgggcgaacgcccacatatcgggcatcgatcgaaatttaccatgaccagtctcatttcgcatcacggggctctcgacccccttcccagatagacaacccccgacgtcgctcgtggcagtcgcgcatattagccggcccatgaaccggggggcgtgcgaggtcgattagcgcgagatctcgagagacgaaacggcacagcccgttggatccagctacaggggattgcagcttgcagcgtcattggtcgatacccgccttgtgaggcatgacgacacagtgtgctatggctcgactcgtagatcgtcatggcgatggtaacgattatacgaatccccccaggctcggcccgcttcccatttgcctctctctctgcctctcgctacaacgcctcgaacgcccgttctagctcatcggcggctcgcttgacgtcgacgaaccgattgtaaagcggtaccgcgctcagccgcatgacatctggtcgtctctcatcgccaacgacccctcgcttgaccatggcctcgaacaccttgtccatgttgcccgacccttgagggaggacgagaagggagagttgacaccccctctgagacgggtccgagggggtcaagatcttgaaccctttcgtccgttccgacacggacgatgggtcctgttcgggagcggccagaccgcggtaccatttcgaggcgacgagcaggtcccaaaagtagcccgtcaatcgttcgctcttctccctcaggacgtcgatccctcccgccttgtcgatgatctcgagcgtggcgatcatgggtaacgaggagaatacgggcgggttcgagtgttgatacccacccgcgccggggatcgggtcgaactctggagacatgtggaaccgtgtctgccggttatgtccccaccaacccgcaagtctatacattgaacgtattgcccgatagtcagcttgcaaagtcgtcgttcatccgcagttcgtaaaggtcgaaataagcgcctaccttcgaccgccatcgtccagtccgtccttgatgtaatacccagcgaccgacccgggtcccccacagaggtatcttttgagcgcatcacccggattcagtcctgctcttggccttgtcttggcccgaaccacgcggactcacttgtaagtacaccaggcggcgaaatctacgccccagtcgttgagcttgacgggcacattgccgatcgcgtgcgccaggtcgagcccaaagtatgcgccctggcgaccgataaaatgatcaatatctgtttgacttcaagaacagcgacgaccgtcggtcccatctcgcccgctgcccgcctacttacaatctcgtgtgtcttgctagcgatcggttcgacctcgaagaactgtcccgtgtaatactgtacacacccgatccagacgacggcgacctcgtcacccagctcgtcgagcctatcgagaatgtcttgcgtgcgtagatgatcttccccggggcgtggtgagaggggcacgatggcctcttcgatctgtacaggagagaggacggccgagtgtagcgctgggtgagagtggatggcgtactggcgaaatcgattcacggataggcgatcggagatcagcacttgaagtttaccctcgaggcagcgacaacgaggcgggaagaaagacttgcccaatccgaggggaacgctcccttttcgatgacgatcttccatcgtttctgggtcggtcggtagaacgagatgaagaggctgtggatgttggacgtcaatgtcgaggtgtgggcgacttcggaatccttggcgcctgtttaaattccaggagcagatgtcacggtacgtgtggatcggaagcatggggaacttcagcggtcaggtcgcctgcaaacaagacgtgaacagaagcggggacttgccgacgagacgggctagaccgggagtcacgcattgatcaatatccttccatggtcgttcatgcggatgggcaaagtgtccataaaccgccctgatcatggaaatccagtgcagagcgttagtcgtcctgatgagtgatgaacgccagcggtcaacgtcagcaaggacggaccgtttactccatacgtccagctcttcattgacgatctgtcgacctcgcttgggcaacagacctagcgaattgccgcagaggtagacgagttctccttcccctggaagaagtatcggacgggagtgagctattgagtgacccatggttcgggatcttgtggcggagatcgggatcgggactgaccttctccaccgctctctgatcggagagggagctcaaactcgtccctcgtccagttcaacgggtcgttcttgtcggcttctaccggatcgaatgccattgatgatgtgtgtccccttttgctacttattagctactgttcgatctgatgtcgacggtcttgatgacggcaatttaaacaagttcagttgtaacgttgtaattatagttatcgtcattgccatgacgaattcccccgattttgaactttggtcgattgaatcccgcgatgaccgcgataacacacaacctcgtatgccatataacacacacacacacacatcccctgtcgcctgtcgattcacccatcaacatcaaggcatcaaggcaaggaggctcaggacgaatgatccgataaacctcggctcgaaatctccccggccccgcttcccaacatgtccgtcgtcgctcgacttcggatggccgtcatgagcctggcaaactcgttcaacctgacaacgtcgatgatgacccgcagtcgaccccggtcgatagcagggatcgtcatcttttgcttcatactgctcgtctattggaatccacggatacaccacaacctttcaccagaagactatctcccgttactccccgaaccggcttcttcgcccaagctcgagggcaggttcaaggatcttgaaagacggctggaggaacattacggggaaaagggtcaggtgaaacccgatcgggtctatccctaccatgccctgacacaagcgcaacaggatcgctactcgttgttgaccgagggaacgggggtgtacatgttcaccacgatcacccggcagatccaggaccaactccccgacctcctcgccgccatcctcgtcgtcgttaacacgctcggagccacgagggtctcgttctcctttctcgaaggaccctcgaccgatctcaccccgacggtgtttcgggaggtgctcgtaccctttctcatctcgctcaatgtgcccgaatcgaggatccacatcgttaccgactcgcccaagatcgatttttcggcagggaaccggatcgaactgctcgctgatcttaggaaccaggcgttgggtcctctgtgggatatgcgggggaaaggagaggtcggggataacgtcaaggcggtcgtcatgttcaacgacgtctacctcaaggccgaacatttcctcgaagtgctctactggcaccacgtcaatggggccggagtgacgacggcgtgggactggtggaaacgtgaacccgggtactattacgacatctgggtcggtcggacggtagattcaggcgatttgttctaccccatcgataacccgtggtggtccgcctcggatcgacttttccccacgtcagagtcgtcgaaacaggcgttcgaggcgctcgaacccttccccgtctattcggcgtggaacggactggctgtgctcgaccctgcaccgctgatcagccacggggtcaggtttcgacggagcgatcgggccaacggcgagtgtgcggccagcgagtgtacattgatctgcggggattactggaaggaaggcgcagggaggatccaggtcgtcccggccgtacaggtgaggccaactgtcccgtgccttgccatacccagcacgacgaccgagatgctcatcttcatggtatcactctgacatttctttcgtgcggcagctcgcctatgaacgagacgtggcgatcgagacggagaaaaagatgcaagagaatcgtggcgcgctcgggtggaaggaaggcgtgcccccagtcaaacctcgacaaccattaaagccttattggcggaatcagtgagtccgagaacgacctgctcgtctacacgcccctctggacacgctcgccagggagaccgatcgctgacggcctggtatcccgtgcagaccccccgaaaaggtcagatgtcacccgtggccagaaacgtcgggtctcgaggccaacgtgtgggaacacaccgaatgggtggacccgtggcaacgctgagccccgtcaacagaatcggccaggaggaaacgacgaggaggtgcacaacgaccatctttacgaaacgctttcacgaacatgaatgtccctcttgctgcgcgcaaaaggacggttggacccccgctcggctgtacaattgtgtattcccatactatcatcgttgttccgtcgttccgtcttatacgcttgctgcctctttggccagcagaatgtcccccaccctcaaccgcgtccatccctgcttgtgttgaatggtcttcttgtacccctttctcctctttttcagaaacttcctctccaagggactcttggtgtgttccagtaccgtcaagttgcacttgaccaagtcgctaggtaagaccggtcgttccccctccaaagcagctcctccagcacctgcgtgcgacttgtccttttccgctttaggtgctcgcaaaatgtactctcgcgagccgacctccattattcggttcaggccgaggagagttccgggtggtggagatcccttgaggtggggcacggtgaggatatctttgggatggagaaggtaggtccgagagtgtagtcgggcaagaacgtatcggccgtgagatggggtagatgatgaggtgatgagggagacggcagagggggtgtcttgaggcagagatgacagtcgctcggcagccgaagccgggggaagcagggggggcagagatgaggtggaagtcgaagcgaccgcggtggccaagttcctcagaccgtttgcgggcctgttgacgacgggagccatcggtcggacgctcagtgctcgcagagcgtttaggcatgctataagaggttctttcgaaattagatgaaagcgtcactaggcgatgattgacggtgtccactcacaagccgttacagatctcgaagaagaagccatatcaacaggttgcctctcttctaacaaaactaacgtatgatggcgacgacgtgcgatatgggcagatcgagtattctcatcatcgatgccatcattgacatcgactttgatcttggtcgagatctcgctcgggcttggtgcgctaaaagaaacgcgcttttgcttggtcgaggaaacagtttggagatggacaggggagagatagacatggcttatttgggtctttctgaaatcaattgctgatgacaataccgccaggtcattggaaggtcacatccgagtaacagaataccctcgtggtcgaagggcatgggatgaggatcccgatcgtgagcacagatgatctttcgatatcgatttcttttcgttacaactcgtcgcgcgcgtactcgcaagtgaaacatgctttgtgaatcaggcggtcgccgagaccatctgtacatcctcctgaatcgtgggccgggattcctgctggtccccagactcttcgcgtcgtcggtcgatgatcttgcgcagggatcggagcacgcgctggacgaatctcgtgttgaggtcttctccatcgataaagtctttgggttcccacttgcggtgtgagaccccctcgacgtgtgccaccaagtcatcctcgtaagcataaagcataccgagttcgctgcgcaccaaaatctcgacggtgtgatcccgagcacaatgagcggcctcgtacaagacctcgagaattggtactagcagagggtacatctccttgacggcattctcgacccgaaccagataagcctggtaatcctcgtcgtgaatgtgctcaaagctctcgagcaagctcttggcaaagaagaacgccacactgttgagagaggtgtggtattcttcggcaggatagtcagcgaatccggagcatttctcaacgggcgacccaaacttgggatgcgggatcgcattgaagagtcgctcgatcccggagggcttggtggcggggatctcctgaggaaccgcagggaccggagggggtggaggcggcgctgcgcccttgattgccttgtcggtactgttgttacccttgctgacggagtcgcggaggatctgagcgatatcgggcatggctacgggaaagggactttgctgtggtttcgcaagcaagctggttgatttgaggggactaggaatgggagaggcgcgagagcactgtttgtcgagagagagggtttcgagtcgagtacagttgggtatctggtacaagccgctcgtgaagcagcatatatacgcctgcagaagggatcccttccgccttcaaacgtttgcgcctcgccttcaggggacacaaaggaggggcgctgaaactcggaggagcttggggtcaagttcagctgactactccccggcttcaccctgtccgaattgcgaggcatcttgtccacgaagatggcgtcatatgcctagtctcatgctgcctcaagacctcgcttcacgtggtcgccccgcaagtgtcacatgtcccagcattccagtatagctacaattcttctatagattccgtacacattaccgtcgtccccagcacccgcctcgtgacctcatgtctgcttggacttcttctttttcttcttcttgtcgctgacgacgtcggcgaaaaggtcatcgatctcgtcctcggaatcgcgcgttcgcttcttgctcttcttgtccttcttttcctttttgatgggcttgaaatcgccttctccagccgtcacaggcgcaccatcaccatcagcttcggcctcgctcttgtccgttgaaggcgcttccacggcagccgtctccgtcttggtcgctcgcacagcggcctcaccgacagccgtcttggggccgtaaaagtgatgcacaaccttgagctgaacctctcgccattccttcggtcggctttcatacagaggtaggttgagccgtttgtagaagaatcgaccgtactggttgttgcttagagcgatggcatggggcaacaatgacttggcaatcttttcctgcgagccacgccatgcagaatcgagatcagtgcctgtgcatattttggcttgttgttctcgcgcgactgatgcgcaccttcatgaaaccgtcggcggcgcgatcccagatcgtgtctcccacccgactcccaaacttgtcgttgacgaggtcgaggaaacgcccgtctagagccagaaggagctttcgcttccacttggcggcgaccttgggcgaaacgaggaaggcgtcgaggacgtgcgagctgatggcgtggtgtgccatccggatgaggtcgtctacgctctgccccaaaaggctgtcgaacggtacgtcaaaatcagccacctgctcctagcagtagcatacggtaaaaacacgctgcgacctacctgttgatgatcgtctcgacggcaggagcgtccaggctgaacatggcctggatcaagatggctccctgcatagtaggttccatcggcgccctttccttcttgggctgcctaggcttccacccgtgcctctgcgcagcatctgctggtaacgcctcgggttcggcttcgggctcgtcttcaccggtagtcgcggccttgtaagactggcgagtcgaggagatggaagggtcagctcggcttgctcggaggacgtcggccaagtcctgacgacttgccttcagcacgttcaaggtcaaagcgcacgggaccaacgactttttctcggggaacgtctccagctcgaaagccttgcaaatacactgtgatggagggtcggttcagctgaaagcgacacggtcgagatgatctgtcgccgagacgtactgtcacgacatcctgctggagctgtccaagctcagcagtccggtccaccaaggccttgaggaccgatgttcgtgcggtacctgattacacacatttcccaccaagacgatcaggaccctggtcgcggcgctgaacagaggcatctcgtcgaacttacggatcaagttggacactcctacggcttccaactcgagcatgaccgccttcaacctctcgccttgcaaccgcttgatcccgctcgagacgacgtaattcccgatcggatggctggcgagtttacccaccttgccgacaaagtaggtctgccagatggcttgcaggatgatctcgggtgcatggaggaggatggcttggagcaagtgcgaccccgtggtatccctcaagagcgagggcaagaagtcgtgtgacgtgggttcgggcgaggtgggttggactgtaccgtccagcaggaagatgaatcagtatgacgctcgaattcataccaggttccgtcttcgactgtgctcaccttgctcggcgacgagacccgaggtcaggtgatcgaggatacttccctccctaagcgcatcctcgtcctcggcttcaatctcgacgagcatctgcgctcccccacgaggtcgaccgaacaataatgcgtcagtgtacgctctcatcgcttcggacaatctcggccgtcggccctggtgtgcggtgcgattccgagctcacctggatgacgggcccaccggcgttctccacgcccatcgctctccactctgctccgctcaacctggcttcgaggtctttcctgatgacgtttctcgtcccttgcagcgcgtccgggatccttcgctcggcagccttcgaggccgatttcgatccgtcatgcccgacctcggcctcgtcgacgatgctcttcatcttgcctccctcggtctgattggctctgaacctctgggatttcttgctccggaccttgctgctggatgggttatcgtacctacccgaggatgattcctggacgtcggcgcccgtgctgctcgggatgtgtttccctggggagagtacgatcaagaggagcctgatgggcggcgaggcaaagggcgaggtgaggagttgagggatgacgggcaagagttcgtcgacgaggtctttgaggagctgtgtggccgtcctcaatttcccacccttcgagtcgccattgccattgccgtcgttgtcgttgtcggcctgttcatgatgttgacgcgggaacgtgccccgggcttctcggtcgatcgtctcgccagccaacccgatcaaggtctgacagacgtgtgacccgaaccgatgttcgatcaacggtctccatttcccgctgaaactgtccatgaggacgcgtcgtccccaatcgcccatgctatggatcagtcgttcgaggacgagcgcggtatccccatccgtggccagctggagttccaaccccctcacttcgttcaaggccgaatggaggaaattcgtcctatcctcgagctccgaggcgagatcttcggcgttgtcgatcgagtgggaggaacgggtgagaccgagcgaggcgaattcgacgagtttctcgtcgacgcttcgaaagtaggccttgacgtccgggtcgacgaaaccgaacggcgcggcgaggtcgatctcgacctgagcggcggtaggaccggggatgaacccggatccatcgaggtgcccggttcgacccgttcgactgggtccagcgggtgtgttggcggtgagggcggcgggggcatcatcgagactgatgaaatcggcattcgaggtaaaggcgtcggcggtggatcctacgacgacggcgtcgaccagggcatcatcatcgtcgtcgttccgcttgtcctttttcttgttctgacgaccgcctctacttcgtttctggaattccttgggcatggtatgtgatcgcgagtgtgtgtgcagttgtacgttttctatggctgcgtgatttgacgacctcgttcgaattttggaaactcttgaccttttgctcgtggacaagggtttttgcgcgaatttagttgataatttacttccgatatcattccaaaattacttccgacacgcatctcatcggatgaaatcacgtgattgttgatcgaaaccaccacttcaccccacgcgagagagcaagagagtgacgcagctcgaggatcgcaaagtaatagatgtatagatggtgatggtgttggtggtggtggtggtggtggtggtgtcaacgtcgatgagcacaacatcggccagtcattaggtcgattcctcttcaggttcttgaatcgatcccggaacttcgacaaacgctcgacccggatcggtcccgccgtactcgcagctcggaacataccacctaattacccaagccggtcgtcgacagcaaccgaaacgtctgggtctggatcgaccgaccgttccttggcgaaataatgaccaacaacgatcgacacccggttcatcttcagtgccagacctagattcgatattaccatccagccgaccccatcccatcccgtcctcttcttcacttcgacccgacccgacctgacttgggacgacggccagctgcggcatggcccatctctgggcagagccgaaccccacctttcaggacattccagctcgacatcgattcgacgctccgctaggcgatcggacgaaaaaggtcatcgcttccggtgccaaggatgccgtcttgtacccacccacccctggacccgaggtgggtagcggggaagagaacgctgggtcgagggtaggaagcgggacgacggtcggggccgagaaggagcaggagcaggagcgggacgacgagggggatcgtcaagctcgaccgggtcatgaaagacgagtttcgtccgcctcttcgtcctcgtcctcgtcaccttcatcggacctgcctaccggatcatcaccctcgacgaccaagaggaatagggaacgaagaccccgctcgacctcgaccggatctcgcgcggaaccagaccgacgtgtccggtcgatcgaacggatgagacctcggcccatagtcgaccatgctcgagtcggatacgtctcagagttcgagcctgacgtagaccatgcctacgacaacgccgatgggcggtacgaagacggacctggtcaggcgtcttttccgcacgatggagactatgtggattcccccaacgcttccgtctttacctcgcccttcgattcgagggcgccttcccgatcgacgttgcgctccgaagatctaacacgaggagcagggtcgggttctgagcaggtccatcagtcggataggcatgcgagttttccggcatcgatctcaccggtgccgctctcgctgccggtccaaccacctctcacttccaccaccacttccacttccactttcacgccgacctcgacctcgacacggacctcggggcacgcgaggaccgtctcgcccgagtctgcgtcggggagtggtatcggacagcaaggaatgacggggaggcaagagttggtaagaagagccctggcggacggacacggacacggacatggtcacccgcatgggcatgcacagggacgagaacagggcaggattccgccatccgaatcgaaaccgtattcacctccggccggtctcgtcccgttcccgacgtcgagctcgtcgacgaccgcttcgtctgtctcaccgacaacgagacctcactcgggatctcgtcgactccccatggagctctcggtcgatgtcgatctggcgtcccgtccatccacacgatcgagcagacgcggttccgcctcccattccccctccaatactagtcgacacggttcggcacctcactccccagtgctccccaacggtagcgtagggatcggtccggctctaggtatcgccaaggcgggcgcgcggttgagggcgatcgtcgacgacgccgatcgcgatgcagcagtgacgagctcggggtcggtatcgcccaccccggcgcacccacagagatcgaggacgagcagtctaagatcggtcccacgacgacgaatgacggatctgggcggcggatcggggagtagtacgcccacggccttcggtccgaacgggtcgacgaggaggtctagcgggttgaacgagctctcctcgggtacccttgcggcgagacgacgggccaagagtctggccagcccatcagccccccgggcggacgatcgggacctcacccggggttctcttcggagggtcgaattggggacgagaaagcgtagtagcgcatcgagggtcaggaccaattctgacctcaagccgatggagcgggaacgggaacacgaggcaggcgaaaagcatggaaggaaaaggggcgccacggtccatttccctccgaccccgatcgaagacgttcgagaggatcgtccctctgcaggagggatcctcgaccggctgggcaaatcatccaaagatttccctgaaagcaagagccttccaggtggactcgatcgtgatcacgaggccgaggggtcagcatctgcgtttgcgcgctccttgacccctgagagcagcagctcacggcgtgacggagctgggtctgatacggaacgtcaaggtaaacgtagacgggtccgctccaggttgggtgacgagtcgacggatggcgaaacttctcgcccagagagcaggctgaagaagggcaaagagcgagcacgggatcgtggacggtataggaacgggttcgaagaggtctttgagctcgagcggtcggggccgggagatgatgcaggtgaggccagtccagcttgtcacgatcgatgcaatgagactgacaattccgctcgtcttgccgccctgctcgttcgcgatatagatccactgcaaaccttgctagcctcggtcgacatcaacaatgctctccgcttgatttcgcagacaacgctcataccagggggccgtcaagccgtcttaccaggcatgggagcaggcctggcttcggaaaaatccgtgacagcaggattccctgcagtgaccccgtacgaaaacgggaatggtgatcgcacgggcacgccgagagataggcccccagaagtctttgtagccaaagctccgccctcagtgacagcatcttcggcctatgtcgatggagacaatgctcaagttgacgatgcggaaaacgtcaaggcaaagaacaagctcatcgatcgagctggtcacaaaaagagcaagctctccagcaaaattgaagaatcgctcaagggagactctctcgacagcctgggcaaaaaggctgcttccgacggcagggtcaagatgcgaagtcgaagaggtaccatgatcgagcgcgactctgtgcgcccagaaggtgaagcattgtcgaggatagccactgccttgtcggacgatcgcgaacaatcgatctcatccgatgaagaggatctcgatcgagtatcgagctctgttgggcacgctgatcccatcaggaacaacggcgtgactagagacgaccactcgagccgttccgagcctgttagtaacggttacgtctctcaggcctttcgccccatcacccctgacgcacgagcagacatcaagcctgcagaaaagatggcggccaacggcacacctgaatcgacgaaaaagaagcgcctgagtggactgtttcatctcagacacagtcgcagtgccagcgccagcaaatggagaagcgattcaaaggcaaaggacaaggtggatcctgcaaaggacgctgctgcccgagaagccgccgagagggacgctgcggaacatgaaggtaagctgaatatatttgtatgttgccggtgaatagagctgatcggtcttgaccttgcagccaaggtgcagagtgtactcttgtcgctgccttctcatccccgttgcgaggctctagcgtatcaagcacgatctcatttccaagcttactatggacttatggtccggtctttggaggatgccagcgagaaacctggccagccctatctcaagtggaatcccctgcgcgttatccgctggagaaagcaagtcttggccgaggaaaagagacgacaaaattgggattccagcgttaatgagcagatcagagctcattataagcttgctcaagatgctgaagaacaaagtgctcctcgtgatggctgggagagacaactccccgactcgatcggcagatcaggcggtagaatgcagcaaatgagcaaagtagtatcgtccccccttcgatcagccgccgcgttgagtcgggctctcgcaagcgatccgcaggcagccatgtcgttgcgcaaatcgggagccttcaaggagtggctcgttttgcccagcgagatccttgcgttcctcgactgccgaggcaatgtagactactttgtaccggccacggatagggcacaggacggcctgcgcatggccatggcgagtgcaccactgccacaagccgatggaatgcccgtctcacgatcggcggatacagtggatcccatgcaatatggcatgtctcccggcagttacaacagttcgcagggtaacaagagcacggtatcattcacttcggacacaccagaacatgtgagtcttccccgattctgacgctcgctcgatgtacatctgacccgcgcacattcctttgtgtccaggggcaagccgaagcctaccaggacatatccaagcgcaaatctgttacgagaaggatgtgggccaatacgcatctgtcccggcatcacagtaatacctccagggaggaatctgatcatggtgacagattcacgcatgtcttaaagagcccgatcgatgccatcaagcggcatgtccttcatcacgagagcgacattgaatcggaaagtgaaagagatgctcgtagtcgtgagcgattgggtcagcatcggcacggtcgattacacaagcttgcgcatccccatcggtatcaaaccggtcgaggctccttggacgccacaacgacccgacccgaggagccagtggctgaactagcagtgatctctagaaagagcagcgtaacaccgctcgcagattcgctcggcgatcagaccgatgagcccggcggccagaacgcggccgagaagaagctcggttggtcccatatcgaaggcaacactgtgcagggtacaggcaatgatggtcctggagcacatgacgtggattctgagcgcgaagaagaatacgtgaagcacgagacgtaagtcctaaaggaccggtccaccagaagcgcaatcatgaaccccacgaactgattgccgacttttcctgcttcaggctgattcgcaacgccgacaccctcttggccaaattgatggccgagctagcgcccgtctcaaccaccttctctcacacgctcgatgtgttcgaacaaggcattgaaaccatcaaccgagcctctggactcaaggtggcggtcccggatatgaaccttgatctgatctccaagggcaaagcagagatctcgtttgcagaccagcaaaggatccagacaggaaaatccatcgaaggacgggctctctctcggcgtggatcactgcagacaacgacaaacctcttgccaggtctacgagaaaccaacagccgcagaggcgtaaaagccatggatggccgcacggtcgacccggtgaccgccgttgaagacgcagtgaagacattgtcattgcaatacgatgctgcattacctcgtgctattgagctcgctcagcaacaggacgatttgcaagaccaggtctctctgttgaccactcgggcggaacagctacgcgtcaagctcgatgccgaaggaaatggaaaggttagccttcagtctgacctaaaagccttttttccgagaggacgactcacccttaatatgttcttctttagatccgacggcagcgcgcacaattgcagtccatgcggatacctaccgagcgatcggtagacaattggttctacatgctcatcaagtatctcttcaatggagctttagcactcatccgcgtcggcattcacgttcaacgattcttcttgaggatcggccactttatccgattggtcgtcatggcgccgtaccacgcatgctgtgccgtagtgaaagccatcatggacgcaggacggtacattctaggtggatggctcatccgcacagcactattgctggcagtatggactttcatcctgctcaattttttcgttgaacgttgaagcacatatacagacattcagatattaagcatcgcataatctctttctcaatgacccattgacgaatttatcatgacgctacgaacacctgttacaatataaatgacacgagaatattggtatactgaggatgtctaatcggcctcggcgtggtatctagagttttcagagcaattggtgatcagcttgcgcgactgagtgaagtcatcccgtaaagactcacccggcccgtctcatttctcccagtcttctccgggcagcgcccaagtccttctcgagcttgagaatctctacttgctgctccatctcccgcaccttgaattcgtgagtagccatggacttgtaatctaccatgtcgtcttcggtcggctgggcagaaatcgtcttgacctgtttgacaagacccttgcatgcgtctgtgaccgccttggcagccagctccaaattctgttgagtcttggacatcaacgaagccttgactcgggaagcagcgaccagctgagcggtagctcctgaaacctcgttggacgcaacgatgagctgttccagggaatgcgtcccgctgatgacgccgtctgcgctgtcgatgagcaacttggtagcaaaggcgactgctttcgcagccgaaatgagaccttccgtccatcgattgtttcgcttgtagaactgctgggtgctgctggagcccttgccctgcgccacgatctcttcctgggagacggtcgcagcttggatcaaacggccaatggcaccggtgatagccatggcagcctgaagaatggcatcgtgcacctggacgtccaagacactgtacttggagttgtcctttggccgggccatcatggcttgcaatcgttgagtcgccgcttcgatcgctcgagacgcgttctgcatctcctgcgacacgatgtcaccaatgtctccgctgaccttggcaattgattgagcagtcgcctttggaatgagcgtctcgacagcctcggatagtttggtgagagacccccggcattcagcgttgcttcgcagcgcgatttcctccttttgggacggtcctactaattgcaatcggtatgattgcaagttgaggaagaacctcattcccacgtctcctgccatcttggcgactcgtacgagcttttccgctgcctcgtcattgctcgcgagtcgcgtgatacccttggcactgagcaaggtctctgacaaggactgggccaattcattggacgccttgatgacatcgacctggccaccaccccttttcttggtagcatagaggttaaagatcgacgcaaattcggtagcgttggtcatggccttctcgatgatggacagggtgtattccggtgtggcggtcgtatttccggttgacatgggagcctcgagctcgtagatagcatcgtcgaccttttgtacacacgcctggaagatcgagtctgccgagaatgtcgcaaggtgcatcagcagcggctcgtgttccaaacaccgggtctcgacacttaccgatgatctcgttcagctccttctgctgatcgaggatcaaagtgtcgacctgcgcggtaaatgcgttgtcggtctcgccatggttctgaacgatcaatctaaagtttcagtaaacgagagatggagagatgaacctttggtgacttgaaacgcacgagtcgaagatcgttcatctgctggagagtcgagtccataccctcttgcaagatcgcaagctcctgatccttttcctccatcatccggctgacctcgccctccttggcgtcgagtttgcgaagcaggtcgtcgatctgcatttgcttgctctgcagcaggcgatatgtaagtggatgtaagccgctggcacgggagcttacattgatcgcctttgacacttaccctgagcgagtcttccagttccgtcagctggcggttgtacttgctcaacatgccagtcacctcggagctcttgttccgggtagcgtcctctgcgcgttcgttggcgaacgacaggtcacgcttgatcctgtcgacttcctctcggtggctctgcacaatgccagcgcggttgatactaatcagcttaggaaatcaggcgtctctcgtgttttgtgctcgactcaccgacttgagtcgatcgacgtcatacctcgccctatcgcgctcccggatcatgtcggccaattccaaattcttggccttgacgtctctctccatcctctccatcttgtcgatggcttcctgcgcagagctagccttgagctggaatcccttggtcttgttgagcaggtcgagatgctctcctcgaagttgcgagtagagtttggcgagcgcgtcgtacttgttcttccagacctcgatctggttttgcagctgcatgatgagctcgtccttggcacccatctgagccccgacattcgctccgatcatgcccaactctccctcgagggccttgactcgctgtgtggtgcatcagacgatcagtaccgagcctaagacggtctcgcgtgagcgatcagtagactcacgcggtcgtactgctcgagcaacatttgatctcgctcgtattgtccccgcatggccagcatctccctctccatctgctgagccatttgagccgtctgatcaaactgctgttgactctgctggttggcttgcatggccatctgatccctcatcagctgttcctgagcctgacgttccctctcggcctgagccctctgctgctcggcaaactcgcgttcctgcctggccttttcctcttcctgcctcttcttttcactgtcacgctgggcgacgagagatgcttgtttccgctcgtattgctcgagcattcgacgttgctcctcgatctcgtcggcagtggcgctcggctctcccgatccgttggcaggcgcagagtcgcgaggggccggcgcggaagatcctccgttcttgggtcgttgaggcagcgagggggtaggttcgcccgtctccaagaggttgggaggttcttgtcctagcttgggaacgttgatcagtccggtcaggtacttcaagttggagcattcgtagtagaatttcctcaagttgaaatgctgggcgttatacctggccctcagcgggtccaagatgccgacatcctcgagctctgtcaagtcacagaaggtcagcggtcgacgtcgctgtgatggccatcgcaatcacgacactcactcctgtgcatggccctcatcatgctcgtgatgaaccggtagataccgtaactctccttgacgagcggtaccaaagcagagatcttgcactcgttattgttgctacccctaaagtggacaaagatgagcttttggaaggtctcgatctggtcctgcagggtcatgagatcgccaatggtctcgtatctttgggagcatcgccgagcatcagcttgatacgtcggatcggctggtcgatgcggtcgctcacccttcgttgggatcgtcaatgttcttcagactgatatactcttcatactcgaacagcccgttgaactcggggtggtgtcggtggaatctcagcttggacagagtgaacgagacgtaggcccggataagaggagcgtagcctgtcacgatcaagaccaagatcgatcgatcaatcgtatcgatcagccgctgttcgcatgccacaccagatacgcccggctctgaacacgatgaagacccacctttcgtagcatcggccgcgaccgtcctgccgcaagtctccaaccaaccagtctgcccatgagcctccttcaaggtctatactcggtataaatccacatcacgttcgaggtcagcctgcgcgctcgcggtcgatcgggttgacgggagaggactcacgacggggtgaccctcttgcaagagcttgtgcacgacgatcaaggccttgaaagtctgcacttcgtcggccaggatgggcagcgttcgaagtccgttccatacagggagggacgagtggtagtcccacgtgtagacgatcatttctgacgagcgatcgggaatgaggttcgtatgagtcgaccgtggcaaggagatgggggatccccggggctagtcagggtcaagagcttacttcggacgtgtttttgctctgcaacacaagagccgatgggtgggtatgatgagccgaatgtctcgactcgcgatggttatactcggaactgaactcactcggggcggtctcctcgggagtgacggccttcttgatgctcacgcccaactctgcctcgttcttgtccttgtcgacgggccgggtcggctggtggtttgacatggccgcggctcgacgacgaccgtaatcctcgtcatccatatccgcatctcctcctcttctgccgaacctgcgatgagagaaaagaggtcagccggcgtaaggcgaggacaggcaatgcgcgagagagtactcacatcttgctacttggttgtgggttgttcaggtgaaacaggtctgggatcgccgggcaagggtctcaagcgagcacgggatacgagagtcttgacgagtcagagtaggagttaccggtatggagaccgagctattatgacctgggggaagatctgaagggtaaacttgtgatgatcgagagtcagataagggatcgacctggacctggacttcgaatgcacatggtgcatacggtgatgatgatgagatggtctgcgtcatagcctcctcctcctcctccccctggctgtggctggctggctcatggctcatggctcttgacccgggggcccattcgaacgcgccatcatggtttattttgataagcaagcctccgagagcagggagtgctcaggtgataggtatctcaaattgccaattatgacgtgtcaaacggtatctcgttgttgacaaaatacatgacatatgacgaacggccagatccatcagtgacttgcatgcatgcatgcacctctccgtacccaaagtcgtcaaagcaacgccgagagcctcgaaccgacctcgacgcagtcaatcgattcacgacccctacgatacactctgtcatccatcgatcgaaaatgttcggcttgcaaaccaattcggcctcttcatcgcggtattcgctccccgtctccgctccgagcccaccgcccaacccgaacctcaaccagacgaaacgatcatcctcttacctctcgaccgggttcaccaacctttccatctcgggcatcggttcttcctcttccaacacggatctagcgagtccggctgggagagggggagagatgaacatcctcgatcgtccgatcaacaagagtcgaggtgtcgaggtcggcttgccggcatgggcgttcttgttcagcgaggtcgtcagttatagtcagaccagggtggacagcgtggcagatttggaaaagaggcgagtgatcgtcgtcggcatcgtcgtctcaggtatcgccgttgccgacccgtaaagctgactcgatgtctctgtgcgtgtctatcatcaatcgaccgacgacgacgatcatcaggctttcgacattaggaagagaagccggtatgcgaatcatctcgttacaccttctccgttcagctcagacgagcaataacaaggtgagccctcgagtacaaacgtttccgtcgactatcctgacttggctgtatcgtctactcgtattgggcgatgttttgaaacacgataggatccaaagaaagagttccgcttgatcccggcgctgcagttcgtacacacccaggtgtatcgatattgtttcgggaaacctgccgatgggctggagaagagcgtcgagggggacgacgagtgtgagtccgagtctatctcaccctcttgacctggtcgagcttgccatagccggggcccggacgagcggggatgatacctcttcctgtacgattctcacactcggacctgtgtatggcgctcgctcacagacatgttgacgctgaacaacccaccgttgacacaacacatttcgataccgagggacttgtcgcaattgagctgtgaagcgttctcggctgggatcgtcgagggggtcctcgacggtctagatatggtacgtcgggaacgcgatctttcgacattcggtgcgatcgacggactgatcgaatgggtctgacgtatgcgtgtacttgcttgcgatagccggcaagagtgacggcgcataccgtcccgaccgatcagttcccacgacggacggtggtcttgatcaagctagatcggagcgtgttggatagggaggaagggctaggcaagtagtcgttttgctcctagcccgatctgtataccggtgaatcaaggcgctatcgagatgaaggcgcgacccgttgtcctgttgtactcccggatgcccgaaataataaacccccccccccccccccctccacctctctcgcaacctattcatcactttagagcgtcacctccgagatgccacgtcgcatacatggattcatggaaatcacagttggacatatcacaaagggacatctcgaccattgtcaactctccgtactcttaaatacgccacgctcgacccataaggctactttatccgtaacctacaaacactcgttccccgaaaaacaaactcgaccgtcgagctctcgaaaacccccaaaagaatgcgtggaaacattgtcgccgcaggaagtgccatcgccgccatgggcgccgtcagtgtcaacgccgtcgaccaccctacgttcaaggcgagtccttgacatggccgatctgattcgcaacgagagggagtaaacctcgtgctgacccttccatcgtctcgattctcgaatcaccgtcacagcccaccgagatccaggctccctttttggaacagttcaccccggactggacctcgcgatggaccgtctcgcaggctaccaagcagacgcccgtcggtgatgagatcatgagctacgtcgggaaatggagcgtcgaggaacccgaggtcgccaaggggatcgagggagacgatggtctcgtcatgagtaagcacaagctgagacatgtcactctctctctcgctccgatgttccgtagcttatccttgattcgaaacgacatgttatcaatgccattcccgtgcgccctcattgactgtcatcaccaccagagtccaaggccgcccaccacgccatctcggccgtcttccacgaacccatcgatgcccttcccgagcgaaaacccctggtcgttcagtacgaggtcaagatgcaacaagggctcgaatgcggtggagcctacttgaagctcttgaccgagaaccctggagaggggatcagggccggagaggatttcacggacaagactccgttcaccatcatgttcggtccggtaagtttcaaaaatcacagaaaggtcagaaagccgtcaaggatggagtggctgatccgtccgtcccgattcgacctgcaggacaagtgcggttcgaccaacaagggtgagtcgagcgggctgtgcgaaattcgccttctccccctttgtactttgccgctgatcgggggaatgactttgcatcgcagtccacttcatcttccgtcacaagaaccccatcaccggtgaatgggaggagaagcacctcaagaaccctcctacccccaagatcggcaagaacaccgctctctacaccttgatcgtcaagtaagcccgacatccacacctccgctgctcgcctacgttcacatatcgatatgcagtgctgatcggctcgaacgcccatttctagccccgacaacacttacgaggtcttgatcaacgacgagagcgccaagaagggtagcttgctggaggactttgaccctcccgtcaacccctcggtcgacatcaacgaccctaacgatttcaagcctgccgactgggtcgacgagtcccaaatcgtcgacacctcggctaccaaggtgagcaatcgggttgcctgtcgacgtgacggatgtctcggtttcccctgactgactcttcgattccttccatcctcccagcccgacgactgggatgagaccgcccctgccacaatcgtcgacgagtccgcttcgatccccgaagactggttggtcaacgagcccaaggtcatccccgaccccgaggctgaaaagcccgaagagtgggacgaggaggaggatggcgattgggtacctgacatggtccccaacccggcttgtgaggccgtctctggttgtggagagtgggagcctcctgtgatcagcaaccctgcttacaaggtgcgtgtggtctcgtagcgccaatccgcccctgatactcctgttgacgccacacctcgctttgcatcacagggcaagtggtcggcacctctcatccccaaccccgagtacaagggtgtttgggctcctcgaaagatccctaacccgggatactacttggacgagcacccggccgactttactcccttggccggtgtcggctttgagctctggaccatgaccgaggacattttgtgtaagccgcggcatcattgcctgactggacctgaacgacgacgatcgagctgacgtgacgtgacgtgatgttgtccctgactttcctagtcgacaacatctttgtcggtcacgacgctgccgacgccaaggctttggctaaggagactttccacgtcaagcgagcctttgaaaaggacgccgacgagctcgatgatgaggaagatgccgagggcaagctgaggttccaggatgtcatcaagttgaagcttatgcagttcaggagtgagtcgtgcagtcttcgatccacgaccgaggcgccttgctgatcgtgccgatcttatcttgtcaggcctgttcgagcaagaccccaagcatgccattactgccatgcccgaagtcgccgctaccctcgccatcggagctttgaccctcctcggaactcttctctccttgttcggcctcatcggatctagcaagcccaccatccaggtcaagcagtccactaccgtcaaggccgacaagaagggccccgtcgcccccgtcgagcccgctagcgtcaaggagcagatcgctctcgacaaggctggcgtcgccaccggcaaggagatcaaggaaggagccgtcaagaggaaagctgctggcaagaccgagctctgatcatcgtcacgttgacccgtcgtcgtccgtcgaccgggactcgcggcgggtagatggacgatgatgccggacgagcgtggtgtttacgagtcttctccagctttacatgttgaggctcgaggtatgatgtatgattccccaagatgcgtgcaattatacgacgaaatgttattcttgcgagtgcctcgtgactgtccgtccacccagccgtctgtgatcttagtcctgagtctctgcttgctcctgccgggctagcgtttaaatccaaacgcgagattttcacatatctgaccgcaatgccggcaaccacagtgtggtcaattcgctgctgagcattctgcctgatttgctatcttcacccattgagctgctcatccgtcggcaaccgctgggaagtttgaccgagtcatggaacctcggcccagctcggtacacgcgcggctatacgaaccacagcccacaacgttcgccgatgatgggaatgcccggccaatccgatcccttataaaggcgacgagtggagatgttgttcgacctagtgtggagggtctgtcatcgggccaacagctacatgcagagactcgcagcatgtatctccgaccggaccacgccgagcacgatgtgcctacgttgcgacaattgattcacgacactcaattgggtctactcatcaccgcgttcacaccggcagaaccctcgtcgggttcatctggctctcgcatccatacgagccatgttccctgggtccttgaagtggaagaccctcaatctacaacccagctgggtactctgaaaggccacatggcgcgacagaaccctcagtccaaatggctggtcgagctcgctgcacggacatccgacggcgtgatccgctcagacgaggtcgcggtcatcttcaccgcgcccgatcaccactacatctcgccatcgttctacactgaaactaaacccaagactggcaaggtcgtccctacctggaactatgcgagtgtggcggtctatggcaacatccgtgtgtacgctgaaggcgacccgcttaagtcggcttacctggacgagcagttcgataccctcacgcgagagagcgaggtcctgcatggtccacacgcgagcgatgggaaacgggcttgggaagtgtccgacgcgcccgctccctatatcaacgttctgaagcgggccgtgatcggagtgacgatcgaagtgacgaggctggaaggtaaatggaagatgagccaggaatcctccgaaggggatcgggatggggtcgttcgtggcctgacgaacctcgggacggagagcgctcgtaacgtcgcagagactgttaaatcgagaggatgtccgcggacctgaggcagtcaatcaatggctggtctcgcttgaaagatgccaagtcgcagcgctcttgcaggcgacagcattcgggttgtttggtgatagtttcttcataacaaatatgtatctatgtgctatacccgcgcgtccagcttgatcagacgtttctgctcaatcctgtaagcaggaggcggtcgcacggatcggcttgaccgaaacttaggcttccactgttagccacagatgtagtctataatccatggtaattcgagactgcgagagagaccagggatgccgggcttcgggactttgtgagccctcacttcgaaaattggtccatcgaatagaagtcgacgatgatcgtggttggaaatgcatcccattttcatggccagtgtgattggtatatcggtctggcaatcacgggccatcagcacttctcgaagcgccacctgacatcggggcacggcccgctctgacaaatgagctacaacgcgtcggtctctggtgagaggaaattcgaaaagtgggaatgggtttttcgcccgccagggtcgaagctcttccgccattgcgctcaagggacatggggagtaagcagtgctatatattctccatattaggggagatttgccggcgggaagacataaagttcgagcggattgccgccctaggcggccggcggccgttcaggtcagggctcaagcgacgtttcgtgtgtcaagagaatcgggggtatcacgagatcggagatgggcccgcgagaagggcgaatgatcattatcctacagatcactgtttgattggaacatgaagtatcgggcagtgtgattgagacaaatcaaagacctaccaggcgcatagttcagaaacgggcggaacagcatgcgaccttgacatatagccgtggtggtcagtgacacgccaggcggtgtcatcaagacaaggaagcggtccacctttccaatgatgccggcgataattattccgataaacaagactgtgcaaggaccgacacgtataagacgatgtagaatgaaaggaacgacatgtttagtatcgttttgcgggaacaagattgttcaaaatttagtgtactttgttgttgcagtttgtttacggcggcagtggctatggagctatgcagcaacgcgagaccttacagacatcacaagttgcgatcatccctggccatatttgagcgtccctggaagccagctacgtctgtctcgagtcgattgaatttgccacttgccatttgacttgctttgacggatttgatgtcaaagtgacctgcccgcggtgcgctcgatcgtttgaggcgcctcgcgttacgaattcactcgaaccatcgcaagcttgcaagcttcttgtcaaatttggatccgctcagtctaaaatccttttcagacgcgtcgccctaccgttcacgcccaggctcagagtatataaacctcgacactgagaacggtccatcccttcacccaactcgcccgtttaccttctctttttcttcgatcaaaaaagtacgtgctcgaatctgccatgcggtccaactccaactttaatagtcgcgataccgtgctcattcgggacacaagaaagaggcctttccgaccctgcggggacgggaggttgaggcagacctatataggaaacggctacttcggattattatttcaggtggagtaattgtcgtgcttgctgtgtctgtgacatttttctattccatcatttccgtctttattcacttgatttactatcgttcgttgtaactcgctgtcaagtgaatggatacaatcaaatattcgcatcctgaccattctctgtggtactgcatcgagatgtccgatcacatagatgggggagttgtagacccggtctggccaaggtacaagtgcgtgtacgaagattccgcggctgcctacgtgcttgacggcgtaactaggcgagtgtcgtaaagcccagatccgggttgtccagctctcgatatcttagctctgaaggtgatcgtttcccggccggaatcgtgtcttacggcattctcacatgatggttcacggtggagggctagctaacctggcggggacttgtgataactcggttcaaggctttccttgttcagtcgaatagcgatctggtatctctcacacgtagtactgaacttgaactttaacttggtcagcaaatatcgtgactgctccagaatctcggattgtctatctccacaaccacgcctactcatctcgttatcggtcgacgacacacaaatagcagtacacagctcgaagcatactgcggacaactccgtcgaggtcagacaaaaggcgaatcatggccatcccaccgggaaggaaggtcgcgagtttctgtgagttgtttctgtgatacgaagtggtcacaccgaggctgagtacgaccgaaactacctccagccaaagctgcggcggactactttgtaccgtctcttccaggcctgcccaacttggcatcgcaccccacgtacgtcgcagcaatatgactgtgcaggataggaaccaagctcatctcctcttgatacggttctgtagacacccgctgaacatctatgcagggaatgtgccatcttatcctggagaaggcgtggctggggctgaaggggcgacgggcgtcgacgccgagatctagtgagcctgccgcacagcctcggaagactcccctcgacaaggatgtcatgctcatcgttgatcgttcataccagtttcttgatggtcaagaatcgacggagtgctggcaagggcagggttgtcttctggttcaacgtcagtctcgcccttttgaatactcttgatcagatcgatcagcattactgatcgagtcgtgcttgcaaccacgacaacatgcagggcggaccaggctgttcatcattcgacgggtcgctgatggagatcggcccgttccgtactgtgccggccagcaagacagcgagtggggaggtcgagctagagctagtagacggcggctgggaagaattcgggaccgtaatctttggtgagccatgcttcctgaactcacaatcagatcaagatgagctgattatggagtacaatataacagtcgaccagcctcctggaacaggatattccgttgtgccaacaaacggatacctgcacgagttggaccaggcgtcggctcacctcgtcgagttccttggcaacttttactccatcttccctgagctacggtcacaggacgtgagcaacggccttgcagaaacggttgtcttgcggtagagttgacattgcgtgttgtgtatgtagacctatctagctggggaatcatttgcaggccaatatatcccttactttggtgagtagccgtagcattcaggcgaaaacacaagcccggcccttgttgtagcgtggctgaccattccgatttgctacgcagccgatgctattctgaagtcagacttctctcccccaatcgccctgcaagggatagcgatcggaaatgggtggattgatcctcgggagcagtatcagggttacgtcgatttcgcctacgaaaagggtttgattaagcaaggctccgaggtcagtccgcgtttgcgatatgttcatccctcatcagctgaattgatatgcaatcgccatcctgcaggaagccgaggtcgtagaaaaggcaatgttcgagtgccaaaacgaggtcgacaaatatgttaacaagaccgagatccccatcaatctcgcgcattgcagcgatgtcatgggtagtgtgaccgcaccattcacgcaggagtaagcgagaatctcaacttgttgcgacaagttttagctgacaaccgcgattttcacagtatcaatggtcaaacgatgtgcaagaatgtatacgatgtgcggctgatggacgaatggccagcttgcggtatgaactggcctcccgatcttcctgacctctactcttatctccgggtaagctgaaatccttcagtgttgccaaaacactgcaactgatgcgtgtcgttgatcactatagagaaaagacgtcatcgcggccatgcacgcgcaagcaaaggagacggcctggatggagtgcgacacgatggtctcgaccaatctgcagctccggacttctccagcagcaatcggtttgattcctggaattctcgcaaagggcgtcaaggtcatgctttttgcgggcgatgaggatctcatttgcaattacaaggggattgagcggacgatagccagtctagaatgggcgaacgaaaggggtctcggagtgagtctcatcgaggaccctttgaaaaggcatatctgatcagcccgtttctcctccgactcagccggatgagccgcaggagtggtacgtcaacgagacatatgcaggaacatggcagacatcgaggggtttgacttatgtcagggcaagtagcgtgttcaatcgcctcgaatattgtctgctcccgcactaaccatcctcgtcataataggtcgcgggaggatcgcacatggtaaggcgtgtgtggattatttcgatgtcaagctcgtgtggcttatcgattctctttgatcccaggtcggattcgatctacctcacgttaccaacgatatgattatgcgattcatggacgtggacccggcagacgtacttggatcagcggctcttcccagtcgtctaggctcggaggagagagtccgtttcgatagctcaatagacgggcttggatctcacagtgaagtcggatcgacgcctttggcaaaagatggcaagtctgactcgcaaaagcgagttcgtacgaccgcgcgacttactctgatctcatcatagcctggtaccatgcggcttcagccttgaccctcttactcttcctggtgggagccgctggcctgttcttctatcttcgagcgcgaagccgaagacgctccaaggtcggtctggatctccgtgtgccgagggatgaggaagagcgacagcctttgggaagagagacccacgagttggaagattatcacgacagtggacgggaacgaggtttccagaaccggtcaccagttttcgagattggggatgaggatttggacgatgatcgagctggagacaagcggagagactagagcaagaggcggtaatcgtgcggagagcacgacctgcgatgtactagtaggcattgacgatgagaccaaccgttgtatcgttcgatctgataccgtcgacatagccacgctcagacggctttgacttagcgcggcttgctgtctagtcgacgaggcgaaagaggaggagatttgaaccaagcaaagccgatgcgaaggctatttcggcctgttgcaccggcgatcaggatcaggtaaaaagatcagttcagccggattcgggtcgagcccgtagctaaaaaatgttcgatacggacaggccgcagcgccccagcgtccactttcatcacttgctgccttcccgattaagccgcaaggatcctgtcatattggcttcacgtcaccatcggtataaggtgaacatgcctgaacccccggatgtcgccatggaccagtcggcattgacgtacatcttgaaccacactgcagaatcacacgtttcattcccgatttgctttccaagcctctcccaagggtgcacaaaaggtacccagtagcgcgaaaatcggtacccattatgaaaacaagcgaactgtcttacatcaaagcccgaacgacaggggtttcccagctaattgatacccgaatccgaaattacttgaaacagatcaggcttgacgctgtcaccaccttgggggaggtgccacgacccggtatctgcgcagcagatgcaaaggtcagtttagcctgcgcgccttgaaggctcagaagcaggaaatatcgcttacgccttggtctttccttctccctgcttgatctcgaccatgacgtcaatgttgaaatcatgtgtgccgtgatcaaagttgaagagagcgtaatttcgcttgtccatgacgtattgcatcctcgtccttgacgaaccgtcggtgtcaacctcgaaaagagggagctgcgggagacgaagacaagtgtcagctcagttggtgcacgcaagtgaggatcggcaagatcttcgtacctggacctcgtccgtgtggtgatctggatgcagacggaagcaggatcagactcgatgatttccccttcaagttcgagtgacgggaccactacttacgatgcaaagttcggtgcttgtgcgtagcaaactggttgttcagagcgacaggcccgaagggaggaggcgtattgacgatagcggatctgagtgacaagttgtcgttagtgctaaccaactgtcccaaggtcgtgcgtggacgtacgagacgacgttgaacatcaacctgtgatccagcgtgggttcgaccttgttgctctctttgtgatacaaagtatgcagctcgccctacagtgcagagtgatcaacaacccagacgtggatcgcggcgggtttgaagaccgccaagactcacgacggcagcacaatgaacgtctccggacaggaagatgattcggagctttttcttaagcgccaactcctgcagcctcaagaccaaggcgtttcgctcccgcttgtgaggtttagcacaccaatgatcgttctagcggtgacgtttcgtcagccattgactcgaacgcaatgtaatccgggcggtactgccaaactcaccaagtcatcgagcagctcgacgttttgatcaaacttgttggtatatccggccaagtggttcggcgtcaacttggcgaccaagttcaacgggttgagcttgctgctgaggatgttttcagcgatggacattcgcgggtagacgatgggcacgcctgtggaattggatccgtcagctctcatctttcgaccactcgttgaatacgggacgagttactcacccaacaacatgatcaattgttccgtcgaaggtggcaaattgtcgagtaggccgaacaattgatcgtacgtttcctcggtacagatctggtccaaccttctctcggctcgacagtcgaccatgcacatggccacgctcgggcccatgtagctgatctgcgaatggttcgggtaaggaatgtattcaccgggagcacaaatgaccatgctcttgatcgggtgcgatcctggggtcctgtcgataccgtcgacggcgtcgttgcaaaagacctggaagatgaggtaccaaaagtaacctcgacctccgatgtagttgaagatgggcgcgcgcatcgtctcgtcctcgtaagatccaaacccatcgatcagatcgtgatcgtcgagcatgttcatcatcgggatcgtcgagttggccttggcaaacgccccgcctcggaacattttgcagtaatgcctggcgatcgcagaaggacgagatcggatcagcgtggggaccaggctcttcgtcctgttaccacgaagactcacgaaaaatagtaccgatcgatggcaaatttgatctcgtcggtgacttgcatagccatcttcttattcttgtcgtgttcattgacccaatcgtggagttcaggctccagggtcaaggaatcgcaatacaactgatctccacctctgaccgattcatcaacatgacgacaacaacctcgtcagcccgtggcctcgcgtgcgttcatgtgacgctcgttcccggacgactcaccctacgagcgcgtgcagaccggtctgctcgtgcttgtccaacaagtccacccagaccgggtcgaaaccgctctcgaacccttcccccttgaaactgttggtatccacaccggcactgaacccattacagctatgcgccgcccacctgaaattctcgctggcggcggcgacgaggaattctatcggtccgcccgagttgacccggtactcgatggactgttcccacgcttgaatgggaatggcgagcatgaatcgccaaaaggtggacactccctgaggtccggcgtaggtgtggaagggttctccttggacgttccactgctttggctcgggcgcgtgcgtgaagtgacccgagtgattggcgaatttggaaggtttcgaggagagctcgaggaatgggtagggcgaatagatcgatcccttgtcgaacgtgacctagggcaatgaggggatggaggtcggtatcagctcagcgttcccgtgcgctgtgatcaggggcgccgcatgaaagactcacgaccatgacggctccgtaccaaataccttgttcgaccgtgtaataactcaacaacggcgtacacctatcccaccgtccagatcgaaccccgtcagcgaccgccccgttctctctctctctctctcgcccgaatctcgccgtccgactcacatcaactgcaaccaaggctccatgactcctttcagacaatcatggtccttcggtttaggtggcaacgccttgccctcccccatcacctcgtcatgcttcaaaggagcctggttctcgtgctcataatccgccacctgagattccgtcctcgagatcccttgtccgggttctccggaggagggtgcgaggtgcgtattggcgaattgggaggagaggtcggatgtctcgcgatcttgttcataatgagcccggttgagctggggaacgcgacgagacggaacacagacgggtcgggtgagtatcgtgccatcgaccggtggatggtgaatgtaatgtaccacccggactcacaggctcgacccgctctgtaccttccggcccatacttcctatcctgctgcgtccccatccctgtggctccttgctgctgctcggcgccccgtgcaaaagcagactgaccacccggttgagctgggtgagattgttggttctcctgtgtaacgcagcgcagcgcggggacaagttccgaggatcgatccaggatcagccatccacgatcggaagagaaccaagacccgggtgccgatcgaaatgcatgaccggattcgccttgactcacccattcagcgcgaatgtgggacggaatatcggtatcgtccctatcgatcccatcgtcatcgtcatcggtcaatgtccacgttcaaataaggaggcgacgagtttggtcggcgagattgaaagacaatcgaacgtcgagtgggacgaccgtggaagggggggacaggggagaacgagatagaaagaggtgagtattccgaacttttactcccaagaggatgttcatatgtgtttcacgagcggagattgagaactcacattttagtctgaaattggctgtgcgattgttgtcgattagaatttgccgaggtgaattgtcgattatagacgatcgatgttggctattatatataaaggcagatcgacttggagaccaaagaagtgtgatgggatctatgcctttgagaagaagtgtgactgcgagattgatcaaatgtgtgaactgcgagggtgttgtcgatttcgtttgtttgggacgtttgaggtttagtcgatggtcaaggtcccatgtaaactgcgagagatgcgataggatgcgatggagatccccgatccagactagccagactagcgtcgaagctaaccgatccaccgaagggtagattggatgggattggaaaattgaggcatcactcgcccccctcccctccccctctgccttgttcccggtggcttgctcgccaagacaaaaagtcaaagaaaccgccaccgacgcgtcatatcggcaaacatgacgtgagatcggctgttcacccccatcggcgaaatgtctgtacagatagatgtgatagagagagaaacggatccattgccccaaacaagatggacgcaagggacggcaaggagaaacaagcgagcacgagaaaactatgcatacattacacacacccttctaacgaaacaagacagaaagtaacgcgacgagttgggggggggggggggtcgctgacgatcaggcggaagcggccgcttgggcgagcttggactttgcctccttcttcttcctcttttcgatcgcctgcctcttttgctccagcttgtcttgctaataagtcgcatatggacgaccggatgaaagtaagaaaaaggaaaagtgggatcagctaacgctctcagacgaaacgcttgcgagcgaccgccgggggactgacctcggccttcttctcattgttcgagtaggtcatcttggtgtacaacctctgcttcttgccggtcatcataatcttcctcatatcctcatcggcagtggccacctttttcgccttttcggtcgccgtacccaagggggtctccttgtgctgcttgacgagcttgtccagcgactttttgaaagcgtcgtgcgagatcccgagcgactcggcttcgagctcggcctggtggatgagcgtctcgtcggtcgggtcacgggatgccgcgaggagcgcaggggtgagcgtggtcgtcgcagcgggcttgaccgtctcgtcgtcttcctcttcctcttcatcgtcctcgtcgacctcggcctcggcgccggcctccatctcgacatcacccgcctcgacctcgccggccgcaggcttgtcctgctccaaccaaggtcggtagacctcgccctcaccatcccagggactcaaatgcgggggcaacgcaccaccaggttcatacccgcttccctgtccgctaggcaagatttctctccggttggcacaatccgccacccattgaggttgaacccaagcccactttcgttgtccctggagttcacgcatcttggtcttgcccataggtcgatcgatgatcacgtgcgtaatcttgtcgccctcgggaccggccaacgagttggactgggtggcgtccgtcgtgggttcgagatgggtgaccaccttgcctccaaaggctcggatgataaattcccaggtccgggacgaagtctctcgggagaggtaaaaggtgtaaggagaaaagatctggaacgccggcgtcgtgttctcggaattcgaagacgagaccatcagggacgtgtacgtgggtaagggtccagacgcggcgtcggtaccgtcctcgttcttgccagggtggtggacaaactcttcctcgtcggcggcctcttcggtcgcgtcggccatctcctcgtcctcgtcttgctcgtcctcctcggcatcgcccgcacgctgtaccgacttgatcccacgcttgacgtcctttttggtgatcctcttgccatccgccgtcttgggctgttcaccgtccttgccctcgtcgtcaccctccctctcgaccaacttgaacttgccgactccctcgccacgctggtccagctggacgtccatgggaggcgggtagaccaggttctcgtcggtgtagagcttgtacaacacgaatgaggtcaaggtccggtagaggtcgagaaaggtgaggaggatacggaaatcgacgtccgaggggacgtgctgggtaaactcgtagggctcgagccatcgcacggggaccgtcgatccggattcacccgaaggcacctcgcactcgtagtagattcccttgatcgagaggaagacctttcgcagagcttgcgttcggatcgcccagacctgtgtatgcggtcgacgatggggatcagtcaccaacctcgcgcggaccacagaagtcgttcgaccggcctgaccgactcaccttccactcgttgaccaacctggcacactcggccgtgacctcgaccggcacctgggtcctgccaggtacgggatccttgggcaacctctcgaacaaactcaacaaactcaaggggtcgttcaactccatggtcgcagccttgaaagtggggtatcgctccttgatcaagtggtccaacctcgcatcgggtttcctatcctcgagacccttggccaacgcccattcgcctcgtccgagggcacgagcgagcttcttggcgaacgtcttgtgctgacggaaagtgttcaagaggggctcgtgcaagaggtacatgatatccttcgagtagtagaacgaagccggggccgaggatcccttgttggccttctttttgttggtgggctctcgagggtagatacctgatgacaagttcgagagcactcagctgaagccttgctcacgcacggagtctctcgtcaccgactcacccttgaggatacatagtcgacggaaatcgctcaacgagatttgcagcttcttcaaagcctgcgttcgggtgatgtagtttttagccctatagtcagttgtaagcgaaatagttcgctttagctagctggagcggagggtatgacgtgcaaagactcacgctccggactcgccacgcttcttgatcttggccattttgatagagtgttcgtgggtatgtgatttgttaggtagttctcgagggaagtgagctcgatagccagtcgatcaacatcatccccatctgaaggcgaaattctcaaagagctctctcgcaagagtccgttcaacatttgcgcggccgccatcggaagcaaaaagttgtcaaaggaccacagagccggggcaaagtctgaaagacaaggtaagcatcatcacgtgaaatcgagcgtatccttcagtcacgagcaaacgagccctccgtgcagcgacctcttacccctcctttcgcatgtatgcccggcaatccacgaaaggatgtaacggaagcatgtgtatgaattctgagcgcgcaagtgaccagtggatcatgtggagcgcacgcatccacccggtcaacaccccaaatgctagacgacgcggcccgttcatcgatagcctgccacgtcggtcaacctttgacgtccctctccggagactggacagactctcttgcagacctattactgcacttctgccagcgcttatccttgccgatcatcgtcgtctgtgacatctcggtgaggactgcgacgcgtccttcgccgcttcgatcgcccgcgcgtttcagccgctcttctaggctatccacctttagtgccatccagaaggggtcctttgatatccgacggaacagtttcacctcgcttggcagctgaagaacagtaaaagggcagatgatcacggctgagcactcttgttcggtcaggtggatgttccgtaggcgggtacctagatagataacataccacttggcgcgcgccagacggctggataaccgagtcgaattgtgcgagcatcgccagtgcatcatgtacttacaaattacaaacatataaagagaatcgtctagtccggtcttgatagtttatccttcaggtggtattgtgcacctcacactccaaactaccgacctcgtcatctcctcatctcgcaactacctgacaccatgcgtctcttgctcctgcttacctcgcacaactccctctctcagcgtctgaccacgattttggatgaactttctccagaccaagtcaaaggacccaaacatgatctctcggggagcatcacgagcctcgcttacacaatcgaatacgctttgagcgaggagctcatgcttcaagccgtagaaagagtcaagccggacatcatcgtcggcgcgtttttgaccaaaaaggtgcccaaggccatctggagcaaggttagtcagatgatcatcatcattcctcctccagcggacaaattttgttgatccggccgtttcatcacatgatgtctcatataagtacatgactctgatattgcaccctgggcctcccggtgatgccggcccatccgccatcgattgggcgctcatgggggactctggcgcgtttgaagatgcgtcggaagcgctcgaaaaggaatgtctggacggcgaagcgtttcagaatcacctttccactaagagaaaggtctggggtgtcacttgtttgcaagccgaggaggaatttgtgagcaacacgaacgcacaatccgtttcgacatttctagctcaacgctgcatttgcattcacataggaccaaggtccgatctgggctttcgagaccttcgcaatccctcctgaagcgaccaagtcggctttatatcgaggacctgtgactcaggcagcttgtctctgcatcgtcactgccttgaccaggatccaaaaagccaagtcgttggcctcgtacgaagggggtaattattctcctaccttgactcctccacctgactccgctctcgtcacggtgaccgggaaagccaacgagattgtcgatcctcgtcatcgtcccctcttgaaaccatgccaaagggcagccgatccaacagtccacactgcagctcatctggctgccatcgttcgagcgggggactcgcaaccaggagtccaagtcacttggctcgattacgataaccgtaaaaaaccgcttttcctccatggagcttgggtagagaatgggacacttccagggggcctgcagtgggaggaattcgacatcggacaaatcgtggccatccgggaaggcgcgattctgatcaagactcgacctgatcccacgactcccgaggataggggggtctggatcacacacgctcgatctcccatgtcaaaagagaccaagatcttgccagccaagcttcccgccaccgacgctctgaagagagccggattggaaaagcatcttcatggcgtcactgagtggtctctcaggacgtgggacaaggtgaacggcgtgaatggtaggaagacttggcaacaagtgtgggtcgagatcgtccccctcgggtctcccgaaggcggtaaatccctttatattcattttgatttctagtaagtgtcgctatctcaatcttggatgcggatacgctattgatgtcgccgatatcaaagcaacggcgcatgctctacgcatcaatgtgagcttttgctcgacgccatcaccgaaagtgtccaaagcgatcccgacattagggtattgtgcttgatggtaagcttcaggaggaactacaaatgttgatcggctttgaatgtcagagcaaacctcccttgttgatcaggggtctcgaaactatttctccaacggtatcgccttgaacgtgatcgaggcgagttctgacccggccaaggagtcttggaagaatatcaacgccatcgatgatgtcggtgagtgcccaagaatgccatccctagctgtacacgtgctgactcgaggtactttactcagtcgaatacgtcttgggcgattcttccccttacgcgcagactcattccactccgttcatgaagggtcgcaagaccctgaccgatcgaggtatcctgactatttcagccatccagtccaatgcagctgctggaggtctggctctagctacctgctgcgacattgtcctctgttcggcgaatgcggtcctcaacccgcattaccgctcggtcgggctgttcggcagcgaatttcatcggtaccattgggtccaacgggctgggctggaagcgagcgacgagatgatgagaaagatgcttcccatcggtcccgagcaagcgcgccagatgggtctcgtcgacaaggtcatcggggatcggaccagctctccggacgatatcgagctcgccatcaagctctatgtcgatgggttggctagagctcgggttggagaaaagtccaagtttagcagcgctccctggctcaaggatacctctgctcgagccgtttcaccggtcaactcgctccttgagcatctcgctcggaacaagagagaacatcacgcctctttgccattcccgctcatcgcctatcggaacgaagagctctctcagatgctgctcgatttctaccatccggtgaggtctccgaggtatcatcaacgccgtcaagcgtttgtcgggaaacacgtatccaagtctactcctctgaggtttgccgagcacaatcgaggcgggtgtggacaggagtgggatatcgaagaacaagcggcgtttgacgatgcgcccgggtggactcgcggtgaagagtggagatgggcgggagagatgatcccggatgggttcttgacctttaagccttttgaagccggtctgctcaccaaaaagaagggtgacgacgttgtcaccaaggatgacggcatggagatcaaggtcgagctcgaacggaccgtcaagatcgccacccgcagcgacacccgaccgagtcactcggatagcgatcgagggaaacccagcaccgactcgacccgatccggattccacgaaaagacgacccagatcactcgacctgggatcctcgcccctggtctgacggcaactcaacctctgagcgcttcgaatgggactcacgctaagcgcagctcagttgatttcaaagccacgttcaagagggccatgtcgatggctacgaggatcaaatcgtccccaggtccggatcatctcgataaagagcaagaaccagactccagaaagtcttttcagtatacgggtagaccgagcgatctcgcgaatgtgcgtgaatccgacaaaccggtaggatcggaccaactcggacgactcgtccaggaacatcaactcgccggggtcaatttcacccaacctgaccgggtctacctggaacctaccgtcaaaatcgcccggggtgtcaaggtcgggatcgatgtccagctatggggtcacaccgacatcggcgagggagtgatcatcgacggacccgccgtcctgatcgataccaaggtcgacgcccacgcgcatatccgaccgttcagtcatctccaaagctcacacgttggcgcagaggccatcatcgggccttacgccaggctgagggaagggacttttatcggcgatcgatcccggattgggaatttcgtcgagatcaagaacgcccaactcggcgtgggggtcaaggcgaaccatctggcctttatcggccaggctaccattggcgcagggaccaacctgggcgcggggacgatcacgtgtaattacgatgggtacagcaagcatcgtaccgtgatcggtgagaacgcgtttatagggtcgaacagcaccttggtggccccgctcactctgggggacgacgcgttgatcgccgcggggagtacgatcactcgatctgcgccctccggatcgctcgtctttggtcgagctcgtcagaccgtcctcgaaggtcgtgcgcaggccatgcgtcgaaaattggccatgagggatgaggaggggtcgacgggcaaggaagcgcaaccgatcttgttcccttgctactattcggtcacgcaggacgcgcctcggcagtcctgaagcgccgaggatcgctgtgggtcacatattgaaaggtgttgagactggtggttgatggatgactggcggtaaaaaacaagatgacgaggaaagggggtggagtgtttctttgtgttgccactcacttccaagtcgatagaaaatgattgtgctttgggaattgtacgccaaccttgaacgatgatgatgatatcgaattgactgtgatctgtggaccccatatccgcggaatgatgcggccgaacgtccgactttttctcgcgcgcgtgttggtgtgatgtgcggaatcaaaatggagacgacccgagctgacgttgtgcgttgtgtggttggagcgtgggagagagagaggaagagggggatcacgccattcaaggacgagtcgacctcgacgaatccccagcgtgtcacacacaatccacacctcgaccacctcgaccaccaaccaccaaccaccaaccctcaatcccttgcaccccagcactttccctccaaactggctttcattcaactaggtcgttgcatgtcagtagcctcaaatcggctgtcaatcgttcagcgtcacttgaacacttctgccaaaatgtcgtccgaatacggtacccgaatcatcggagtgagtctcggtctctccaccattatccgccatcgtcatcaggctttggtcgttcaacacgagctgacatgcaactggttcttgaccttgctcgtgcttttcgtaggctcccaacactttgggtgagtctcggtctcggctttcggtcccacctcgagcagttcttgcactgcacgacctagagctgatgtcagttggcgaccattccagagcaccgagtcttcatcgagaggaacggaaagcccatctcctccttccagtgagtacgaggtcgttcgaaacccggcccatcacacacctctctgaccttggcctcgtaccctgcgcctcacgcacccgcttagtgacatccccctctttgccgacgagtccaagacggtcctcaacatgatcgtcgaggtcccccgatggaccaacgccaagatggagatctccaaggaagaagccttcaaccccatcaaacaggacatcaagaagggcaagcttcgattcgtcaggaactgtttccctcaccacggatacatctggaactatggcgctttcccccagacgtgggaagaccccaacgtggagcacgccgagaccaaggcgaagggcgataacgacccgctcgatgtttgcgagatcggagaggccatcggatacgtcggccagatcaagtcagtgtgacgacgtgccccagatcaccgtgtgtgagaggacacccccggctgacgctcgactctgtctcgtctcccgcggcgcatggtaggcaggtcaaggtcctcggaatcatggccctcttggacgagggtgagactgactggaaggtcatcgtcatcgacgtcaacgacccgctcgccccccgattgaacgatatcgaggacgtcgagaggcacttgcccggactcatcagggctaccagtacgtcccactcccaccaccaccaccaccaccgccgccatcgtcacccccttttccaattgacgaccttatttgtactgtacaacacccggcttacccggattctcaatcacattcatgcgaatttcccgatcgtgatcggttcaaagaggacatcctcgctctcgtctcgttcgcaaagggggcctgaaaccccgatgggcatggcagggtctgaagctgaatcgatcgttatagtcatgatggagaaaagtcaagagaagcatcgcacgtcgagaacaagcactcaagtggcgtaaagcggtcgaggacctttttcgcgagttgaaacgtggtatgatagaaacccgagagagaggtagaaagaggccgggaaagaaaaaagtgatggaaaagcccgatgagaccagaagattagattctcgggcggtcgtaacgtaaagacgtaaaggaggacgggcagaggctcgctcggaaccgatctgtcggtccgaatcctactgatcgtaagtccctccggtatgttgagcggctgaatacgcaagagggagcgcgtgagatctcagactacccgcgtggacgcagatatccaatcgatgggacttaccaagcctggcttcgagagctttcagactgtcttccttggccactgagattacgaggcaccgataccggctcagcctcgacctagattcgaaccacgcgcatcacgacgacctactcagctcttgcttgcgctgcaagatctccctctgcaccctgagctcgatctctttcaatttttcctcctccctcctgagttggtcctctttcaagagggccgactgctgagccatatcggccggagctacgctagagctcctgcagcgtgggatgtcatgacgacgacaaagtgagcgatcatgccttgcgcgaggttcagcacggggcatgacttacggctcgctcccgacagctcgagacagcttttcggtacggtaattttcgtacctagacattacagccgtcgtcgtattagccaggcgtgttctaacatcgacaacccaagcgcgaaacccgattttgactctcggcgactcacaagaaatcgtgagtaatctccttcaagtcggtcagatgggtcatcaacaaggcctgcctcaacctggcgaaatcgctgtggtccgggttctcgacctcgacgataccccaagggtaccggcgaccgcggacggattccccgttgatcatgaacttttcttccgagccgacaatggcgaacgggagtagggcctgtcagggtagacgtcaaggagcggtcagcgggaggaacgctgtacgccgacaaaggatatcggacctactcggagctcggaattgtcttcgatcgtgtcctcgtcatcctcctcgacgtcataagggaagttgtagacggggatactgtagtgctcgatatcctccatgatctgaatgacgaacgggacaatgggttaatcgacctcccccaccgaactaaagcgcacgagcatcgccgcgactcgccctctttttgaattcgcgcagctctttcggggtcaaggtgtctgatttcccgatgacggggatgacgttgaccctcggtgccaacctcctcatgagctcgatatccatctcccgcagactaggcgcgtttatccggaacagaggagcccaagctcagtctcgacgttctccggtcccgtacccgtctctgcctcgaaacactcacgcgtgaccggtcggagggataaagtagagcaacgcgtggacacgctggtccttgaacctcgggttccttcgaatccgggattcttcagcgagaatgtgatcgtactgtagttcgaggtaagacaggatttcttggaaactgcaagaaaaagagagggggagcagtgtcagtgatcgagaccagtcgaggcaggatggagaggggcaagagactcgctcaccagtattcgttgtcaatgttatccccgaaccctttagtatcgatcaaggtcatggcgatcctcacgccatcctcttccagctctatcccacatcaaacccacgtccatcatccagccggaccagaccgagatcagcttccacgttcccgggggcaacaggccggtgatccccggcgggcgacctcgacttaccgacttggatgggtttgatctggatacccgtctcgatatgagcttcttccggggtctgatcgatcgtatgcggcaagacctcggattcgcagagcgtgttgacaaacgtcgtccgtccggtaccggatgctcctgctccgtcgtcatggagggggtggcatggggaaaccgatcgtgatgacgggaaagaagaacggggtcgagtcggtgaccaggggggtggtaaagggagggcgaacggtcagtctgacgccttcctcatgctcgatgatgcgctcgtctctacgagcgcgcatcgaccgaccgaaccgaatcgactcaccgacgaccatgagcgtcaactgaacgccctttttcgcctgcttcctccctcttcctcgggaagccatgggggagcctgaagcttgtctaccgtggtcgaggaatccgctcatcgttgcggggtgggatgttttggatggaaggacggggtcgggtttgatgagctccgggatgtgatgcttgaaggctatctctaggccgagttcgtgtatgatagatggatgcactcgactgtgctcgtgctgttagctggaaggtagtggccggtcgagctgggttgaatggaggtacagaaggatggtgatgatggtctgattatcgagtatgcgagtatgacaataacaacaagcccgtgtagctagtgactagctggtagccctagccctagccctagccctagccctagccctagccctagccctgaatagtcgcttgctttcgcgtcaagtttactctgaaatcgtttgcaccgcggattactttggaataaatcaaatgatattgaatggaacaaccctaagcatcaacctcgatcgcctcaccggggatccaatagaacaggtcgtaatcacaaccatcaccaccctcatcccatacggtcacccatagctagacaccccaatagataatacactagatcccgtcgtcatcgtcgccgtcgtcaacatggtcagcatcttgcgtgtattcaaaaacatccgtcagggaggaatccgacaatggtggaggaacatgcagtacgttcagaaaacgcaacaagctcatccggtgcctaggcagcatgatcgcaggctcacctcaatcgtcttcatcatcgtgtctgtcgccgtcttcgtttccgtcgccttcgtcggcgtgatggctctgcaggtacatcggagatgccaagttcggtcgactagtgggaaccgactcgctaggaaacaagtactttgagaattacaacccttacgaggaagtacccggtgagtacctcgccttcgagcaccatctgaaagcgaaagtcgacgcggctggagaggatctgatgaactctctttcggtttatccgggggatcgtttatatacaggccgtcaacgttgggttgattatagccaggtaagcgatcacactgatctcccccgcttgacgggacgcgggcgttcttgaaagatcgctcatcttgtcgatggtacctcttttttcataatcatgaacaggacgatttcaatgccagtcgtgagtaacgctgcggggtcgtggatgggttcatcctcacaagctggtcgatggctgatccgatcgtcatggtcgtcggtttgaccgttagaggccgtaccgtgaatatccctcctgctccgtctcacgagagacggggctttccagccttcgacaaccatgatgatcttactgaccgtatcatccccgtcttttctctttccttcatcgcatggccggccgactgactcacacgacccgaacctgacctgcactcgacgtcacgccatgcaccgtacggcgaatcgaaacacagtgaatggcacgcctggttgcaccatatccgaacggaaccccctaccgacgaggccatgaagaagtttactcccaactggaaggccgtgagttctgaaatcgccaggatgaaaccccccttccctaccacgatctggtacccaggatatacgtcctcgggttcagggctcgaacttgaacctgggctgaacctcgctcatctgaacttgaagctgaccttgcccctcgtcttccatgtccccgtcgttcagccctactgcgagaacattaccggtacccgaggtcgagcgatcacctactctaccacggcccccaagatcagggcttgggaacctgttgtcaagaagaggggatccggcgcttccgcctagagagaggcagggacacaagctgggcggacaaggcggacgggtctggattgaagccgcggggaggagcagagatgatgatgtattatcgtgtgcgatctcggaatggaattaatcgtttgaagatcgcggcaagggctaaaggggaagagaactggtctattcgtgcggcatatccatgtaacgtggtgaggctgggctgtgtcatgacgagacgctgacttgtcgtctgccatgacggccgaataagagttccccgaaaccgatcccgaagacgaccgacgtgcagaaccagacattgaaggtcatgaccaccaacctgaggagcgaccagactcgtatgagccgggcgcggacttccctgggcaaagccccactacgggggcactcacatcaacaggtaatggatcgcgctgatcagcatctccaaacccgctctcgggaggtcatttctccagacaaaaggcaccgagctcctattccccgcttcgtccctcttcttgaccattcgttccaatcgttccaatacgggaggcaggtaggaaggtgctgaggaagggcggtatcgcagtggggtcacgtgatcaatcgaggtcggtgggtaggcgtgtgtgagaatgtcacccgtcatcgttttggcctccaagttggccgtagggacagcgtttggatcgtgagacgaagatgtggatagggaggtgccgtcagctcgagaccgttgcggtgagagtcgtgaaagtgtcctgtcgctcatcgtggcatcagtctgtgttcatttccgctgacgggcagatgagaaggctgtatacctttctttccatgaccactcgctacccctctggatggctagtagaagccttggtgtcgctcccaagaggaacaaagcgatgctcgtcccgatcactgcacctacgctgctcgggacccaggaagcgaaccataccgcatccgtagacgggatcgtcgcgtgaaagtacatctttctgtcgttgcaagatgatggtcagagcgtgatccagctggagagcggaagagctggctcgacttgcatgctcatgtgtgcagtagtggatcccgtggaagtaccgtccatcccgctcatgtcgtggccagcgtgcgaggtcatcgtatcagtgcgagctctgcgcttggtcgaatatgaaaggcaccagactgcagatagctaggatctggtcgaatgcttgatatgatagccgagccatgataaatacctcgagactctcacatcgaggctggaaataggtttgtccgattgtgctccgtcaactgcgaccgacctatgttcggcaacgatccacgcccccccttctccggtcgatattgcttccgcggcgtgtttggggtgttggacgaatcgtataaagagctcaacccactggagcacggtcacgcaggagatcccctttcgctcgtgctcgttccctccacatccaacctcctagcaagaaagcatcatctctgttgtcatcaaccaaatggcagattctccgttcgctgtgcccgtagcgttccaggtttacgagtaagtaagatgtcatgactggcctggagatttcgcgcctgaaacagcctccacctcgcccgtcagctcgtacgccgtcgatccgcaatggcagaggtattacacctggacgtggctagcggtcgtgattagtctcatagctatatcctctcctggtctataccgttcggtccgaaacggatcgatcctgaagggatgggctatcacggaaacgacgtccgacttgccggactacccctcggctccgaacgatagcgaaaagagcgcacgcgcgcgacatttgcctgacggaacggcgacctgtaagagtcgcggcaaggctactactatcgggcgcgcagtgccaggcatcctggctcgcacatcacgatacgttcgggcgcttcgacaacgacttttctttttccacatcggggtctgggggttcggaggaagacacctcgcacttaccgtcgggcaattgactctagtcgcggtatatttggcgctggtcctcatctgcatcttcaaggacgcagaactcaagaccaacgcgaatcggccaggtaggcgaggattccgagtcgaatttcacttgtccgtcatccattgacgttcgatgatcggcaggttttatggcgctggccatgctcacacccctgtttctcctcgctaccaagaacaacccgctctcccttcttctgggatcctcatacttatccctcaactgggcccaccgatgggtcggcaggctcctctggctgagcgcgacgatccatggcttccaatggatcacatactacgcacagacggacagtgcttccactaaccttggtagcgacaaggtacttcgagggatcgctagctgggtgctgttgacggtcttggctggaagtagcatcaaaccgatcaggagacggtggtatcagctcttttggtatatacagtgagtccgatccacgccaaagtgcctgaaattctggctcagtaggtcgcttgcgcgttgcaagcatgatggcttttgttgcattcttcgcggcagtgtcctaccacaccccttatagccgaccctggatctggccgcctatctccctctacgtattcgagtgagtatcagcaccacttcacctgtgcagacaagatgggtagacgagctgacttggaacggggatataagcctaacatgtcgaatgtgcaggtacagattcaaagacgcatttctcgtcgctttggatgacaatctcacgatggtacgcctttctggtgcgactcccgctgtcgcaatgctgatattgtgcattactaaagattcatatccccgactgccatcacggttggttgccaacgcaacatgttaggatccgtattctggcaaaggataccatgtttgaaagtcatcctttgaccatcactacctcgactgctcccccgggccgcgggcgcgggatcatactgttcgcgaaagtggctggcgattggacgagaaagatcaatgccatcgctacagcaggagaagagatgatcgagaggacggaacaagaggttcctgaccaggcccagccggaagcatcactcgatcgtgaccaatgcctgcaagtgcaggttcttctcgatgggccttatggcggtttgaagttcgacctggctgaataccagacagtcctaatcttcgccggaggaagcggagtcactttcgcattaggttgcattgaagaggccatgagacgtagtcatgactctggggcagaaaggcgactgagacaccttcaacttgtctgggcggtgaaagatctgggtcagtacatgtctcacgcgctttcgtagcttgatgacactcagcacgtcgtctttgctcactgcgaaatagctattgtcaattctcttgccgatatattgagaggaatctttggtagggtggctgaaatccctcacctcgagctggaactcgtggtgcatctgacccgttcgcgctcggctggcgatgcattgcccttggagctctctgaacttgctaccctggcttggggacgtccctcgatttcccagctgacacgagctctgcgaaatctgggcgccggagacgattctgacgaaacaatggaggctggtagtatggctgtagtcgcttgtggtccggagcgactggtgcaggaatctcgtaatgctgtcgcgaagctcagctttcacgaaaagatcagagtcgggtccatagcatttcacggggaaggttacaccatctaggtcgcgatgtaggcgtgcacaatgttttatgcataccataatactccaagtgaattctaactgccgaggtcgaaaaagttgcaccgggaccagccacagcgtagatggctcatgcggctcaaatcgctcactctcgatcatccccagagctgccgaatgatgccggcatgcgcgatttcccgcatccgcgcgctttgtttgctattggctgtttccagtctgaaacgccagacgacctttccagagctgagtgtggcctgtgcccaagatagatacggcaatcccggagcaaaagacaatcgcagaaggggacttgtgaagccaggacctgtctcgatataatagttctactcccagtcagctctgcctgggtcggtcagcgacattggatcgaaacgaaagtgatctctgatcgtcacaagcagcccagacacgacgcaagcatcctctcatatacatcgctctcagccagccatgctttcgaaaatcaccctcattaccctctccatctgtgccgcttccgtctcggctcatttcaccctggactaccctctctcccgcggcttcgatgaagatatagagcctaacgtaagagcggtgcataacacgagaaaccgggacacatcctgattgaaggagccaatgctacacacagttctgtggaggatttggtcagcccagtagccctcgcaacaccgttcctttaagtggaaacgtccctggtaggtctcatgtcatgacaagcggatctgacgatcgcgttcgcgagagcacgcgttgatctcgccccttcggctgaacgtcgcagtgcatctcggttctgaacatgccagcgctgctgttgctttactcatctcgaccaaggaggaccctcaaaactttgatgatttcagttccacacttgccaagaattggtttcaagtgagcaatctttgcaatgactttaaaaatgctgccggtgccaaatacgctgtcctcccgagaccagatatcacaaggggcagcctgcttcaacgttgacttctccactctcaatatgaatttgtcaaacggttccgaggtcacaattcaggtacaatacaacggagtaagtctactgcgaggctttgcttcctccaacttgaactcatgcttctggctttcgtatctttccacaagggggacggcaacttgttccaatgctcggacctgattctcattgaaggagctcaggttcctgccaacgagacctgtgcgaacgacgactcccttgcctccaacgcaactcttaccgcgactccgacagccatcacgaccgcagtgactggaaccgctgctgccgcaacccagaattcaatcaccggtgctgcagccagtagcgctgtagcttcgagcaatcctagcaatggagccgagaaatccaagcagccgctgatcctaggaagtcttctcgctgcattgattggctttactctgtaggatcttgtctgcaacgttccgaaaaagactccttgaccgcatgctcagcggcggacaatttcttatcacgaccattatatgatgattacggctgggtagctgattgggctccatcttcaggccgcaatgtatgttctactcgaattctccgttcctcaacatatcgcgagcggcataagctgcctcgaatgctgtctttacctcgtcgtcctcgtcatcttctgcttcctgcgcgtcatcgtccaaggtcgaagttgaaagcccgtttccctgttcggattcaggtaacagttctctagcggaagaaggttccatcttgacgtaattgtccagctttgtaagtgaagacccgggtttgcttccccgtttgctatctgaaggaggctctgggattcctagtggtacagttcgctcgacgatttgaaggccggccagggtggcgttcaactgatcctcgaaaagcgatgggtgttcgcgagtctcagctaccaagcccatctttacgagtccgttcagcggtagctcaggcttagtatcggtactcccaaccgatggtgctggtgtcgatggagataccaaagataatggttttggcactgctttgacgcttccgtcgaccgggaaagaaccctgcatgtagatatgaccgtctcgcagtaagacctccccgcgttcttccatctcttcaagtagctcgacttcaagctcgatccgcctttgttccagccgcgggtctcccctggctttgcttttccatctcccgtaatcgccgggtccgacatcctgacgcgtccagatcgcctcgtctcgaagtctgcggttgtaccaccggctacgtatcagacagtctttggtgcagaatccatcgtccttgtttccttcctcctgcctaatcaagtcacgatttcgagaagtccgtgacgtggacacgactcctgtcgagcgaaaggtgtagtggctctgggcagtgtatggccgtcgtgaagcagaagagcagagagggtaagagcacattgacgctagatgcctttcgtgttccacctgatcataatcataaggagtaatatagaggctctacaatcgaatgagtcagctttgccggcatgtacagcctcaacagcagggcttacagctcgtttcagagtctgacgatctaccgcctgcgactccatcagagtgtccaaccatatttctagctctttttcgatagcgaccctgtattccttgctatctctcaggaattgcacctcgcctctcaggtggtcgatcgaggtaccagccgattcgttgatttgcgtgcgatcacgaacgaacagggagtgcggttgcgaaggtatcatgctgacaattgcagcaagcttatctaacgatctaaggtcattggcaggccgctcccgcgattccatggaaatgtacccttgcaagctgtttaacagcatgatccaatctggatggcatccgaagcgtcagagcgaagatgatatgggagagggaggtgatccggaagcaaataacggaagaaaagtcgatgtgatcgcatctcgttacattacggaacagaccgatcgtaatgctaactatcatccagggtatatgtcatttcagaatcatcatcaattccgtcaaagctcagtctttgcggtcatcacttcgaagtagcccgtccgcgccctctcgcagtcggcgaacctcgtccgcgctgccagcagtcgattgcatcagttcaagtgcttcttggacgaggtcgccttcgagcttctcgctaagaccggtgaccaaacgcgctcgtcgctccatgtacgctttttgatgttcgaccaccatgttgatgacgaaattcataaagacccgcaccagcagtgcggttttcatgccaaacgtcgagcgttgcagagaatcgaggtaaagatcccgtgccgtataaacgtaatcgttgtactcttcttgacgcaagtgagagaatacattcgcgatgtattccgcaaatttgatccagatgtgattgacatcaatccgtaacatggcgtcgtcaccccgagggacgggcatgttgtagacatcgcgttcgtgcttgtcgtcgcgaaaatcgtcagcgcgtcctcccagggcggacccggatcggctactcgatgacagactgccactgccgaatgcgtcccaattcaaaccaaagccttgattggtttcctgaagcgccgcttccatagcatcgcaatcggctgcgagcccgccatcgatcatcgtgagcatcgccacaagggagagacggaacttgcgttgcaggtacttgatagcgccactaatagtgtcccttctggtcgtaaccccctccaaaccagccgctaataggccctcctggtagctatcctcgtcgagtccgaacgcaactttggcagcatatcgatgcgtctctgtcagagtcattcgcaaagtatgtttgatgttcgaggaaagcctggacattgacatgtgtcgctctttcgggtcggttgcgatcataggaggaaatctgtgtcctcggtccagctccgtataccagaccgcctgcctgatactcccttcatccagttgaacatatgacgcgttgcgacttgatgtcggcatttgccgtaaggtttcggcggcaagttcacggatgacgcttgcataggcagtgccgtcgtaaccgtccggtcctggtatgagcttgtgagggtccgatccttcgacaggatgcgaaacatccaagcgattctccgaggcactatcgatctcgtcctgaccagcgcgccgatcgtccaaaccgtcctcctgctccgtcctgcccgtctgtcttcccctgtctgctgctctcgcgaattcggccgaacgctcctgcatgctgtccaaacgccttgagcctggcctagcgcggttttccagctgagaatccgtctggtcgcccatctctcccaggacctgacccaaggtgtcctcgaaacggctggccgcttcgctcatctggaagaccacctcgctcgccaaggaattccgggaaagcgctcctctatgacgatgggtgcgtcgggtatacggttcattttggtagtctgacctcgagctgatatactgacgggcccgattcgagctatacctcgactggcgcataccgaacggatcatcgttcgagggtcgacgaattcgatagtaagccgggtggtctgcaggtcgagatggtccaacatcaatcgtcgacaagttgatctgccgtgttactggaccccaccctccaagcatcaggccatgtgaagtgtgaaagtttggtggtagaaaagagccgttcgaatctcctgatgggatattgatattgtgagaaccgcgtggatgagagtcttgcgtcctgatattgtggattacctcgggagtcgagtctacctgcaagtccaggctagatgcaggattggtcaggccgactgtcggtccggcactgagcgttgcgcctcccgtgagatcgcctccgaatcctgggtatatctcagcgttatcatcgtcctcgtcgctgtcgggctccgagttatcctcaaatccttcgggagccggttgaccgagaccatcgctaacggattcatcgtcgccgtcctgatgagtgaagatcgctccgcgcaagacttgtcccggacgataggtcctaagacttctccgcctggccctccttgatctggcaaagtttccagcatcgacgatcctccgagcagtggccatgatctcgttctcctcttcttcctcctcttcgtcgacctcggcttcctgctcatcattgtcgatctcgtgcatcgtcacactctccggcgagtgtgtcctgtggcccggcggattccgagtgtcaggaacgatgatatcgggcccatcgatcggtctgaatatgcggggtccaaggatgtcgaggtagtcaggatttcgaagtccgacggtattccgaaaacagtcctaagatatgtgtccgttcgtcggtcttcagcgcgggcttcctaggtgcaaggtattggatggactctttatcctcactcacctcgatccattcgtccaagatctgcaactcgtcgatcatccatcccctccctctgacgacctctttaagtgccgcgaggacttcatcaaggtcactagccgagagttctgaagtaccgttgaagccgttgtcatctgcccagtctaggctgatagataggcatgaacggacgtggtcgattcagtcggcggtcaggtcattaaggttccttttggatgagattcgacttacatgcatcgaatcagagcgtcatcttgccaccaatcgttgtcccacctcctatcctgttccacctgtctatcttcccgaggaagaatcctgtagagcgaatcgaagggggtttgtcaaccgggttgaacaagacggctcctgttttgtaacgcgagttgaacgactacacaccttggacccatctgtgcacttgaagtagctctattctgccacgtggaccgagcgaaagatgctgggcgcagtgttgaaccgagcagggagctttgataattcgattggtaaacttggacaggatgggctgaatggcaaaaggtgttgatgatctggaccagacataaggacttttcgactagatggccacttgctgcactttcggatgatgccgtgatggatgattttcggaagcaaatcgaccgaatctcgcaggtcgatcaactcttactcatgctctaatctgaagatgggggggggactcgcaaggcatccaagaccatgaacaatacaaggcctacatctcttgactaaaccagcagcccaagatcttttgaatcaaacacaacgagtgctacatagagacacagcttagccctgccgtcgcccaggatgtccgaggacccgcgctcacgaagccagagcggggacaacgttcgtatacaacatcaaacttaccctgaaggtatccctggcaaactcccacgccggcagacctctggatcccgcaatatggagagtagtctttccaagtcgctcaacaagcacgagtatacgggccatgcggaaagttcggcaatggcgactgagcaactcgccagattggacattgccaggaacgatggcaccccgtccccttcgccttcttacactcatcgaggggattcccaggaaacgccctcggtcacgtctcaatccgagggggaggaggacggacccaacgaaatgtccggaaccggatctgcatcgggcctcgttcggaaacgggtcgcatcatcgtcgctcctcaaggggcagcatcatctcgctcgagaatcctccaccgatacgctcgagggcgaatctgatgctgctatcagcaagacagtcgtagagaaagcttggggacctgctcccatcaagaggcggaccaagagttggttatcaaccgacccggacaagacccccggttatgaagcgccggatcaattgcaacgtgcaggcggatatggggatgagctcgagatgagcgtggaaagcgatgcagagacaagtgaaggaggcgacgagaagcgtagtatagccgataatctaccgcccgaaatcattctccaggtcggtgtcggtcgtgatcgcgcgtgattgttcatgcaaagctgacggggttcggattccttcccgtagatcttgggtcatctgactgaaaacagcgacattaccaatgtgctttacatttcacggatatggtgtcagtgtacgatacctctcatctggacgcgcccaaacatatacgacgaacgatctcttcgcggtctcatccggatccttcgcttgtctaccggtcgaggcagagacatcctctacaaatcgacaaagacaacattcccttaccatctcctaatcaagaggcttcagttctgctctttgagtactcggcttcaggacgaacatgtcattgaatatcagcactgtgacgcgctcgaaaaactcgcgatgaagggcaacaagtacgtctcttcccgcgcgctcgctcagctcgtcaggggcaaggacaagctcgtcgtcgccgaactcgccgagacgagggtggacgatcaggtattgatggtgctcggtcgggattgtcctgatctcgtcgctatgagcgtaccggactgtcatcatttcactcctctcggtctgatggcgtttgcgagctcggggaacaagaaacttcgacggatcaagttgtcccgatccgtcggagtcactgccgaaagcatctcggcgctcgtcaaggcttgcccttccatgctcgagatcgagctcgccgggtcacaggacgtgactgattccgctctcattgacatttggctacatgccggtcgactgagagagatcgacctcaaagggtcggacaagttgacggccaaggctttcccgatcttttccgagttgaggttgatggaggaccaatcgctagccccagatcactcgcaagcctcgctcatgcctcgggagccggattccaaaagcgtaccccctgacatggattattcagtgttttcgagcgtgccccgggcaatacccgcttcactcaacatgaactcgctcagggtggtggatatggaatcgtgtatcgggttgaccgatgccgcgatcgacgcgctcacctggaacgcaccttggatcagggccatcacgctagcaaagtgctcgcagttgacggacgcgtcgcttttgagcttgtgtcggctcggcaggcacttgcatcacgtgcatctcggatacgtacccaagtgagctctcgacggaaagtccattccggagcggaatgtttccctgatcctttggttcgattacagaatcaccgactggggtgtatgcaaattggctcggcagtgtaaccgcctgcggtacatcgacttggcaggtgatacgcttctgagcgacttgtccgtctttgaactggcagcaaattgctccaaactcaaacgggtcgggctcgtcaaggtcagctagtgccaaagagacacgacgcatatggcgtatgacggctgaatctctcgattgacggcgattgcaggtcgcacaactgactgacgcagccatctcagcccttgtcgaccgacatcaagacgctgccgcaaacttggagcgtctacacctgtcttactgtaggcttcgtggacccgatcgaattcacgacgaacggtactgatgtttcggaacctaggcgataacatctcagtgaaagccatcacgcacctcttgaagggtgcacggaatatcactcatctgagtttgaccgatgtcagcgcattcaagcagcccgaattccatcggtggacgcaacccgtgccagcagtgagttttaatcttggtaaacaggcttcactacgtttaaaactgaggagccaaaaatcccagaactacagctcgggtcagcgggcggctttctgcgtcttcacgcgtgacggcgtgatcaagctgaggaaatggctaatggccaaagaagatcagcgatcgcctatcacttggcgtgattcgaccgtcgatcagcggacaacctccgagtcgctctcgcattatcactccaggcaacgtgcggcagccatggcatggctgggctcaccaccgactgaacgggaaccgcgagctccgctagccgagatgatggcggccacgtctagcatctcggattacggtttgactcttgggccgaacccagtcactttggacgaagagccagtggcatccaggaacacggttcctttccaccgtcataggcatcctccatccatcgagcggccgacaccgcttaacgcacgcacaccgcaaggccgaatccctagcctaggctcggcagccaattggcagaattcgaccccgactttcggtcaagccggaacgctgagtactttaccgggcaatcatcagcgactagcacgagccataccaccaggtacacgaaacatcacacaggcccgtccaagtcacctggattcaatgctggaagacgttcaacagcgacgggcttctgacactcacccagtcgacacaacagatatgcccgaagcgccctgacccctttcgaatctatgcgaatgcacttaccatcacgacccagcatgataattcccttgacgatagatagtgtatcccatagatgacgacttcggattgaattctacaaacaacattaaagagctcgactgcaagcctggttgtgagcgtgttcttgcgcagcctcgctctgatggtggaactggcggaaaacgtatccaggagttattttgttatgacggcgcagctcttagtctcatagccatatggaggatgaaagttgtatgcataacatcgataaatccatccgccggcctctaagggttcaacagtccacttcggttccgaagagactccacctctcctttctcaacctctccagcctttccacgtcgtccaacttgccgtcttcacacccttccatccatccgaaacgcatcgtcacctcttgaaacacctcgacgaccttctccttgccgaaacctagcttgccgaatagcgcgatcgacgctgtgttggacaggcctatccgagagataaagttccgtggagggatttggagatgcgtcatggcgtagttcaagctggatgcggcatatgggtgctcagtgtgtgacagacagccgtgagatgaactgtgtgctcacagcaacgataaaatctctttcgataaccctttgccgcgaaagtcgggctctgttgcagatgtcgtgttttggcatcccgaatcttgcatatcatcatatggtagagctcaccggcgatcatgatctcgcactcgacatcttccttgggtccatccggtaggaataggttggtatcaccgatcatccgcaacgaatctatgataccctttgtcaaggaggactcatttgcgtttgcaggctttgagaggacgatgaatgtcaattctgaaggcaaggaaatgaacagatcaatcgaagagcggattctacgattcaaagccagacttgctgtcatcgtcgatatgccatttctctaatgaaacacgtgattcaggatttagccatcgacatgaacgagacatggttgtagattcgataacctactaaccttgcatgtcgaattcttcctgcagcgtaagaggttccgatgccgtagcttcgagcagctctgggtccttcatccattcgtgatatcgctgtcgtcaagtgtgcgccaatgggttgtcatcagcttgacccaattcttcgataggatcgtattgttcccctacctcgacatgttctcggctgtcctaccccgtgaagatcacagtgaacgaccgaaagtcagtgtcgatttcggccatgtgcggagaatccccgcgcctgaccggtacggaactaggacgacatgttcgcccactatcgctgtggtttcgttgagacgcatgtcgtgcctttgatagcttacgagctttgttagtgatgctgactggaatatgtcagatggcggaacaagactggaatctactgttagctgactgcacgctgctggtgatacttacctgcaccgacccgattgtaacaagcgatgttgctactccgttcgattacgtaatcaatcgacattattatcatcatccctactggcggtatacaaagataatttactgaattactgtattctttagttgctcacacagtgtccgtatcatcgccctcctcgccgccgacgttagcagatacgtgctcttagccggtggttatcagcatgggtaactctcagtcccaaactggaggtaatgcaggcggcggcgatgcatctgcagcccccgcgcagctggactactacgacctcctcggcgtagacgaagaggcgggcgacgacgagatcaaagtgaggcatcgacctaagccctggaaagtaatgtagcatccggttgattttttcgtttcatatggccattttgatcgaagaaagcttttcgaaaagctgcagtgagtctgcaataccagctgccggattgcacatcaagctgggcaagtcaagaagctgacgaatgccgcggcgggccgtctttgtaatttctagctcaagcaccatccagataagaatcccgacaatgtagaagaggccacaaagctgtttgctgatatacaacaagcctacgaggtgagcacagtccagactgccgctcgaccggagctcgccgaagctcaatcaccccgatgtcattgccccaactctccaggttctgagtgacccccaagtgagcttgttcatgtcgccaggatgaacaagataccggtttactgacgaacactcacgtaaatcgcggttctggcaggaacgagcatggtacgaccgtcatcgaaatcaacccgtggctctctcagacgatggtctcttccaacacgtctcaaaaggcgaaaaggcaccaccagtatccaaacgacgacctggggaaccaggagtatcgctggaacagcttatgcgattctttgatcccaaactggcgaggaaattggatgataccaacgacgtgagccgggggcagcggccccatcttctctgcttccgacatcaaaagggttgacagctgtttctcgtcgtctgcgttagggattcttttccatctatcgctccctgtttgaactgttatcttccgatgagcaacttcacgacccgagcaatgcagatgggatgcatcctccgcccgcgtatccgacgtttggaaactcgacgactccctacgcaccacctcccggctcgacccgggctgagaaggaggcgggcgtctgggtcagagatttttacacggtctggagtcagttcgtcacgaacaagggcttcgagtggaaatcggcttgggacatggacccatcgtatgatcgcaaggcgcgaaggtgagtttctgtgggaatgtccataccgatcttcattcgctgatcacaagaccgctgcaggatggtagaaaaggacaacaagcggcttcgagatgacgttcggaaagagtacaacaatgccgttcgagaattggcgatctttatccagaatcgagaccctcggtatcatgcttatcaacgccagcgcgaacgttcgaaaaaggaagcgcagcgaggtcccgctggtcttcggcctcgaggatcgggcaagcctcagcccaccgctcgagcgcagccgacggccaagcggaacgtacacgcagatatggctgctcagcgtgccgatcctggatcagagttctacgcccaatcttggcagcaagtggagtctgtcatcgacctggacgagaacgatttcgccacgagcgcaaagcccaagaagcccagcaactggaacgagacgggtatggtcgatgaggaaggcagcgattccgaagaggaggaggggcagtacgagtgtttcgcgtgcaacaagatctttgcaagtgaaaagacgtgggagaatcacgaacggtctcggaagcacaagcaggctgtggaaaggtgagcctgtgacttttccgatctgtcacggttcgcgatttgacatttcgtttctcaggctccagaaggagatgatggaagaggacgaggagcttttcaataccgacgatgaagaggaagagggcgacgaagaggacgatgacgattcccttgcagatgactttgacgacgctcttgaccttcaagacgtcatagaggccgatctgaaggaggacgaggtcgatcaggaagttgctgcggaagagactcgtgcaaatgagtccgatggcaagcctgacatcaacgacatgaagctggcagaggatggcagacaagcggaagaagttgtcgaccgtacaccggcagcgacatcgacagcggccacctcgaatacgggtctctcggacgatgacgacgaggatgaggcggacgatgcatcacggagcgctgggggtaaagcttcttcgatgccccagatgtcgaaaaaagacaagcgtcgagcaaaggaacgccggaaaaaagaggagcaggaggtgaaggccaagagtggcactgcaaaggtgagcagacgcttgtggaaggtccacgagtagaggatttggtctcagtgatccatgtcttcctcgtagcacgcctgcaatgtgtgttcggaagagttttcctcgaaaacgaaattgttcgagcatgttcgggatgaaggacatgccttggcagaaagcggacgcggcggtcaacccgcgccgggcaaaaaggggggcaagaagcgtaaatgatcacggcgtgattgatggtatgcaaaggatgtcgggaacgacagggatgttacatgcgccgctggcgagggcacattattataatcatacagcacggtgcccagaatgtcgtcgaccggtagcctagccgacggtggtagcattcgaaccggtcggttgccagtacctgccaccgcctcccccaccacctcgaccgcctgcatcgcttcgcccacgaccgcccgagccaccgccacgagccccacctcgacctcgtccgcgaggggcaggtccactgcccgaggtggcaaagcctcccgactttcgtgccgaccatccgggtagagctccatcgtccttttcgtcctgcgcatggtcgacagtagtcatgaatcagtatccctcgtgggaagttgtcaccaatctctggtcgatcgactcacggtcttgcctcgtcgtcctcctcgaaccttggcctttttcttgaccggctgtccatcctccccaatctcctgctcacctccctcctcaccctcaccgtcctctccagcctcctcggcctccctctctttccgcttgaccctctgctcccctacccgttgattcctctcctcgatcttcttcttcctctcccccgtcgtacccccacctccagcggtaagctcgacgttgatccgcttgccctcgagctcggtatgatgcagtttcaaggcggcttggaggagggaagaggtggggaattcgatgaacgcgattccacgtgatttgggcgggccggggggtttggtcttcatccccaccccatccccgcacccttggtcgtcctgaccgaagtctcggcccttccgaatgtttctcaaaaagatctgcaggtattccgaactcacgttttcgcccggtgtggtgcccagcccagtcccccacctcctgggagtcatgcttgcgtctgatcagctgaccaagtagtgccaaccccacacacaggcagatcccggggatagtagtcaccgaacacgatctagccaattccgaatgcaccaagaggttgcagaaatcacctagacccatgaaatcagacacgctcgacgacaagaggtccccttggtctgctcgaccagcccaagagatggcctcggatcatacggatgagctagaccacgcaactgaagacccgcaggtagggacgatgatggacgattcatcctcgaacaagcggaaaaagtcgtcggaccgcatcgcatcagcgtgtgcgaggtgcaacaaggccaaggtgggtcttttcccgtattacggcttcattcgccttgttccgacacgcaaagcgagtatgctcaagtcacctcacgctcgcctggcaggcccggtgtaacggggagaagccttgctcgaggtgtacatcgatggggcgggcacaggattgcatgtacgtgccatccatgaggggcaagatcaaacggtcgaaaaggtgagttctgtaccaacagcatgaggctcaaagcatcttctgaacactcgtcaccgatactctttccagagacacgacgacgccagccatcaaacttgacgggccgcaggatcaggcccggcggccgtcgcagccgccgaaccaggtccaatctcctaggagcgaatcctcggacaaggtctcccacctcggtcaatctcagtcgatgggcccgtccgggacgagtcaacgatcggactcgtttgccagtatcggtcgacccgaagctggtttcaacgcagggccatcttcgtacctgcctctggctgcacaacaccatccgcaagaccatcaacacatcaccgccgcctcgcatgcgcattcgacaccgaaatcgaccgcagactcggataagcctcaaccccgtcggtttccctcgatcgggaccgtctttggcgaatcgtcacatcatcacctctccacctctcgcccgatcgaccgagagaacttgacgacgcttccactacctggagacgctccgaatccgttgggcatccttgccgaagcgaccatcagcctcgacccttcgtcctcttcttcacccttgcccgcttcacaccatcgtcattcgcatcacggcccgccccctcaagaagggaccgactattattcatcctcgaaacagagttccacaccacgaacactcaagtctgaggctccgcatatcatgcaattgatctcgccgtcggatgccgagagcctgttcgaaacgtattggaaaaagatccatccgcacttgcctgtcctggataggggtcgatcggcttgcatcgatgtggcgagcagatcgaactacctgttcaatgccggtgagtacatccactttcccgcgagatcttccagaaagtcccaacattcctggctttaatctgatgggactcgacggtgcagtctgctgtgtcgccgctagatccttcaacatcggtctttgggccaaactccgctcgtttgcccgccaagagatgacccgtatcccactcgaaaagactctcgacgtcgttcaagcgcaccttttgtatagcgaatggaatctcatcccagccaaaaggttcgaacaggacatgacttggcttcgggtcgggattgccgtccgtaccgcgatggacatcaacctccatcgagtcgcactcaacccttccatccgacgaggtctacccaactggctcgtcaggccgatcatcaggacctggttattatgttatacgttggatgggaccttgtcggctcaacttgggaaaccttcggctcttcagggggaaggctccgtcggtcggtatgccgcgaccctgaagacggtttgtatggaggacgatgtcgacgaggaagatagggtgctggatcttagcgtagcggctctgacggtaagtccgaggcagcaaccgcatgctcgcagagtgccgataggaatgagctcaccgagtcccgaactcgctattcgataggaatggacgcagatcctcgtcagagcggtcgattgtttcaaaatgagcaatatccaaacccagatgggaactgacatccatgccagtgatttcccagagtgagttgcgtctcgtttgtcagtttgatcttcactcgggagtctggctgaatcaactgttccaaactgtcctatagtcttgtggttgtgtttgacaatcagctagaggaatggggtcgaagccatgccacgtatgatggatcccgatgtgagctgtgggaagggtcattcggctgcttaatcaagctgatggcgtgtgatgcccctgcagcgagacaattgacctgcagccggaatcgattgtgcgttttccatcccgcatttcatggtgatatcccttggttgctcatgtatcgacaagcaacagataccatcgctatggccgacttgtcgtcctctcctatgcgttataccgggcgaaaacgcagaacacgctcgacttgccgtcaacctttgttcaggtcagtcatcgtactgtctttaggtccattcaaatatactaatgtccccgtgctaagcagttccaaacggttgcctcaaacatcatcgagtgcttcgaaaaagattgggacgatcaggggctcgcgcgaggttgcccggactttctatacacggtcttgacatttgccgttgtgtcgctgctgaaggtgagtcggtctcgcccttctcaggcgagagagcgtagactgatctgtcatccatgccgttctttagtctgctcaagtccggtacaaggagcttctagggggatcgcaggaacacatctttgggctgtgtcgcaaggccgtcagcatgctttcccaagcggctacttcggctgatcatcttcccgccattcaatcggtattcctatcacgcttgctggacatccgtaccgcaccatcttacacgcctcgcgccatgctgaaccagcccctcgacctggatgcatcgatggagacgatcggcctgcagccagagcgtacctactggccgcccaccgctccgacctcgccgctgttcaccgagatgatgaacggcatcgatatgagcgctctcaacgaaagcggcgagaagggaagccacgacgcggtcaaaggccagaacgtttctcctccaaagcatttctggagcaatccggacccgaaccacttgatcagcccgaacagtttcgatcaagcggctcaagcgctgcagcaagcacaatacgatccgaatgaccctagggctcaagattaccaattgccaatccctgaagtcccaacatcctccctggcgctcagtctcggagcttttgtcggcgacacctcggtcagggacgtcttgttcgcgaacgacagcttttggtaagtcacatcaactcgcatcacaatgaccctgtctctgtgccaacatacccactctcacctcaggatgtctattctcgagacacaggagtccgtccttgagacccaggattaccaatgaggcgctcgaggccatttatccccttggacgcaaagcaatcccccttgtatacagcattatgaactctcattacaacggcatatcattaatgcaagtttatgccatgatgtacactcgtacctcctcgcgccggggtctacgcctggctagacctgcctcgaggggtccactcccgcttcttgtacgaaccaggcgaagtgttcaacttgcccagaacggtgtactcgaggtgctccttgacactgtcagtgtaggcttgaggcgcagtgtagtcgaccgagaacacggtcacggcggtttggcatgtcgtcgtagcgatcagagtctcgccaggcaagctacagtctccagaaacgcaggtgttgacaccgatggatccagagaggtcaccccaagtctatagcatgtgacggcattcaggatgggtaaagtcagtcacagctgacggtcagtcgaccacacctttacttacggggaaccctgcctcggtaaagaccaccttgtcggtcaatgcgcttcccgtcatcctggtctgaatcatgggcaaaccgacacaagtggctaggtcgatatccagtaccgagtcagctcgaatgtcagacgataaacgccggtaaatgctcacaattgatttgggggaagttgacgttcaatcccaaagcgggactggcgaaacaaggcgttccgatcagtctgcggacttcgtcgaatggcagaattgccaatcactcacggcagaaccatctctcccttggtcttgtcacgtccgtaagccagcgccgaaacgaggtccgccgtcaatttcccttgaacgttggctacaagcctcggcgaagcagggacgtgcgtcagcctcgtgatcggtttcacaaagatcagaatacgacgactcaccgacttctgtgggatcttccgggttccaggcatcgtaattgaccttggtcgagttttggcccgagaccgcaatggcggggattcctcgtcccactgcgacataggccgcaccgagggtacccgagagggtgtagacgaggggtcccaaattgcttccctcattcaccccagagacgacgaggtcgactgactggttctgtaagatccgagtcaagttagttgatcataccttcttgaattcagctgaatacagcggtgcaacctaccttgaagaagcttttcacgacgatcaccgattgtcagcgatgaaccaggaatccatctgtagtgatcaggcaaacttacacaggcgctacgacatccagagcgtagaatacacaggcggccggcgtcccgttgaagtaagtctaatacggaagtcgaatgattactccgtgcgagttgaccggcgcccacgaccgttgatattcgagtacatacgatggcaggattatccacgcctggttcggtaccggcgtaggggagaccggcggctaagaagtccccgcggccacctcccgtcaagttggtcgtaggccatatggtcgtctacaccagtccgtgggatagtccggaaacagtcagccctgctcgtttcgtttcaagaccgactcgcggcgagtgctgtcgactcacgcctccctttccagactgttgatcagcaggcccaacgatcagaaccgagtggttctgcttgacgagctcgttgtacacggccctgatgttggcggacccgaatccgtcgtcattggtaagtacgacattgaggtgggcctggaccgaaacagccgtcaaggccaggcaggagaggagagcagcgatggatttcattttgttttgcaaggattatgattgggattatgcaggctgggtgtttcaagggatgaccacaacaattagggatgccgatgttctcgcctgtccttatactcaaagccagatgctctagctcgcactcccgttactatcgactcgaataaccggcagatgacctctcttcaagcaagattccgattgtttggggccatgcggtgtataagcttgcgcgataacatttcgggtcaccggcggagtctctggctaccccaagttcgacccgccatcttgatcaggacttggcgagtgcgcaatgcgtggaacttcatcgaggtccaaggtgaacagacaacaaggagcggttctagcgcatcggcgatgtcctatcttgtaccttacccgctgccgccacggatacggacctatttccttgtcatcgacatgggtatcgcatgtcgcagtcacctcgtgcaaccgaacataatgtccgacattagcgggatcgccgagggaggtcacgacaagaggccgattatgagatacgaacgaaacggtgaactcgtggagaatcaatcgaccacgatgatcacgaccgtcgtgcccgctccgctgtcagtgctcaaggcaacaccgagcagacctaccgcacaatgcaaggtcgacgtgtctcttgtgattcagtcgatcatgtgcttgctttcatgtgctaatactacatccgaaacccttcaccggaactctcccaaccgatctgccaccttgaaatcggcccccgtgacctctctcaagtgctcgagcgtgaccccctcggccatctcgaccaaggtcagtccgcttcctcccacgcgatccacatcgaacacggccatgtccgtgatgatcctactgacggccttgctcgctgtgagcgggagggaacactcggcgacgaccttgggtcggccgtgcttgtcgagatggtccgtgacgacgatgaccttggtatcgtcagggttggaacacaaatccatcgcgcctcccatccccttgaccagtttcttcgggatcataaagtttgccagatctccagtcgcactgacctccatggcgcctgcccgttattcgatcgtcgtcagcgcttacgatctaggctgcgaggtgaactcgggactgacctagaatagaaacgtcgacgtgacctccccgaatcatcccgaagctttccgagctatcgaacacggacgctccgggaacgagagtgaccgtctccttgcccgcgttgataatgtcgctatgttgcagcgtcaaagtgttgatcagcgccgtaccacccggacgccgtcttacgacagactcacgcatccacctcgtcttccgtggggtattctcccatacccaagattccattctccgattgcaaccagaccttgactcccggctcaaggaagctcgctgcgagtacaggcatccctacgcccagattgcagtaaaatccatccttgagctccttggcggcgcgacgggcgatcttttccctcttgatcctggcttcgttctttcccttcgcttcaccctggtcctgaccttggccctgcgcggactgaggtttacgcagtgtagtgatctcgatctgtttgtcgaccgtggcggggacgatccggtcgatgtagattcctggaagatcaatctccatcggtcccaattccccaatttcgacaatgttttccgcctgaaagaaagttccgtcgagccgcgacagcgattgaaagtcagcttggggcgcgttctctgccacgaaacgcccgcctgaaacatcaggcaggggtagaatacccacctcgacgatgctcaacttggcagcttttgccatgagcggcgcaaacgctctcgtcgtatacctaaacgccacgtatcatcctaccgtatcagctcgtcctgctcttcatttcggcgctccgaaatccaacctccggctgacctgaatcgacagttacccgccttgtccaccttccaagctctgaggatggccacgtcccctttgatggccggttcaaagaggtatttcttgccctcgatgaccttggtctccttcttctctccctccttgaccacaccgcccgtacctcccttttccagcttcatcgggatgcctccgtgctccacgacggtatccacccctgtcctcgtccaaacccctgggatcccatgtcccgcactcctcaacctctccgcaatactcccctgtgggctcaactcgagttcgatatctccttgcaagtaggctttttccaagaacttgttggtcccgacgtaagagagggtgatcttgctgacctgacccgattcgatcagaggggccagaccgcccgtgtgggtgataccggcgttgttgctgaccattttgagaccggtgaggtctgatcggcttttcagggcggtgatgatcgtctctgctacgccacatagtccgaagcctagagggtcacggaggttgcatcaagggaaagaagaagaggaggacggtaccgatgacacgtgaacgggttgggccgattgatacaatgatacagagcaatgcaaagagttgattagcttctccggcgagggcaagaaaatcaaccggctcaacaaccagccgagcttacctgcagacaagatcgtactcccgcttttcagatccttgacggcgtcatccgccgagtcccacaacttgcccctctttggctctgtagcgggttcaccgacctgttccgccggggaagggaccgaccctagcttgtgtttctctaccaatcgaggcgtgcgatcgaccgtgttcaggcatcgttgttgcgtccaggtagatgtcgaggctgtgaccctgttcgaagttgcgatgcgtgtccctcgagaaagcaccgccgacgacgaccgaggtgcgcgtccaaccgtcgatttgatgacgtttcccaacatcctgtatatctttcttgtgactttgtctatgaagttttagtgtgctagtgcagtcgcgctgctatgagatgtggttgaggattatcgtatagctctgtgctgttctgatcggatcttatatcaagtctcaagtttgttcctgtgtttcgtcatcgatcaagggggaaatcgggtttcggttataagcgagttgaggtggtgccgggagatgcggctatttttagtttccgaggaacttgatacgtcattgttacattgtcatttcacctttttattttgataacaacgctcagttcatctcaaccacctagccgaatcgcgtcatgtcatcgactcgcgacctgtttcgcattttgcattatgagacccgctaccaacaatactctcctcgtcgattggtatttgctttactcttttgttatgtaaaagtatgcatacgctctccccgtcaaagtccccgtctgagcgttcatcaatgaggcgcgatcccggggaccgataaccaccagtccaactcggccgtcctcgtggtgtcggcctccatcccgaccgaattctctccgaacagaatttgcctctgagcgtccgtcttgtattcttcccacttggtagcatctgcccggttaggattgcccgagacgatgactgtgacgggagatgatggaggatctctcagcaggcgcgaacccaatcacgatgcgctttgaatacgccttgcgactcacaggaagaatagtaagcgagcatcttgaccccagtgtcactcttggcaacttgactcagtgggcccaactcggtagcgtgccccactccgagcttcctgaactccgggtcagctgtcacacgggcacgtcgaatcgaacgatcaaatgatcagcctcggatctccccgagcccagccgagagaaactggctgtctcactcactcgcgacgatcttgttgaaatggtatttccagactggcgctgccttatcattctgcctagagatctggagcacgttctgcctgacggtggagatgtaagcatagtccccataggcggcggcgagcctcgagaattgagggccaaagggcgtctgtttgtacggggacgaagcgtccgtcacgggatccggatacctcgtctggatctcgttcaattgttccggcgtagcgagcgggaacagggtttcgaagaaggccctgaactgttcggtagtgttcaggttacgagggacgaacccggtgccttcatccgtgttgtacccggtgatcacgggcactcgctcgaattgcccttgagcccaggattgggagggtgcctggttcacgtagtcgtaatcgaccacgggttggaaaggccaggtgaccgagggactgtactttcggaacaacgtcacactgccatcgagagaagaaaatcggggtcgatcagtatcggtcgatcgaggatattaaacgaaatccagccctccagacccatgactcacctggcgttggcgaccttgcccgcgtccagctgtctcaagcactgccacctggcatccccttcttgggtacatccggtcatgttgaagaactcgccggcctgtttctcgtacagggggaacgtccagtccggccaagccctggcggcgggtccacccgagtccatgatgacctgcttgaaaggtcgttggttcttaggccactggtgttgcaagtgcgcgccaaccgagtgcgctccggccgattcaccgaagagctgcaggattaggcgaggttcatgatcagcacgcggtgaactcgaaaagcgcctgatcagggcagactcaccgtgacttttttaggatcaccgccgaactttttgatgtacttctgaacccattcaaaggcggccgcttggtcgcgcagaccaagattgagggctccttccttttgaccgatggtcgaggggacacctccgaacgctccaagctgaagtcacgttgtcttggtcagcaaatgtgtcggtcgagatctggattgaacgtactcggtagttgatggagactgtaaattaaatgcgtacgcatggtcaggcctcgccttacaaaccaagtcaaagacgctccaggcgactcacctccgatgaaatcatcgggtgcgtttccgacgatagagggcacattcaatccccgaccgccaccggtgttgaaggcgcctacagtatatggtagatatgtcatgagcatgtcgcgcgagacctaagtaagtggagacattcggctcaccaccgggcacccaaatgactacgggcaggtccttcttttcgtacccctgaggcttgaacaccgacaaggtcaagcaatcctcagactccccggctgtaccgagtccttgcaagcagaccggaccgtaatctctcaggctcaacttgttctgcttggacttctggggcggctgaggtcgcttgaacctcaattcaccggtaggtggagaggcatagggtatagagtaccaggcgacaacgggttttgctagcagggtgccagacgagttggtcacgccttgcacagaatcgacctcgatatagtcgagcttgatggcaccgtcggcgaggacagtatgggcggccaaggccagggtggccgttaatatggaaaggtgcatgtggatggggatggtgatgaggatgaggttgaggttgatggatactgacagtctgtctcgattgaaggggctttcgacagtttcgatcggcgcatggtctatatacccctatccctaacgccaagggttaaccgcaaactccggatttccctcatccgaaacgtaactcccctttcatgtctaaccctacccgttgcagccgcgaggaccccgtttccgtcgatcaatgcggagttgacctccgctcgctacgtccaccttgccccgcacggagacagatgagtgacatcgagttcggaccaccagatacaccggcgttcaagccacctctcgctgaaacgccgaagagccggtcgatcgatcgctgcccgactgacggggaccatgtaacgatatcgaattgtacctgaaaggtaagaagtccatgaccaagtgacactacagcggttagtatggatgtatcttgtgcgaatatgtcggactggacgagatcggggcccgaacttggtcgactaagaaatgatcccggaacgcgtggacgcctttgacaagagaaggccaaggtggactgcctccatttgccaacttgagcgggaaatcaatgagaatggagttccaggcgtgggccctacccggaattcccctgatcgatgagagggctcaaagccgtacttcactttttcagttgtcttcagagatcgcctgtggatcctccacattggcatactcgggtagagcaactcccggctccgcttacttctatgagatttagcatgacgaagtagccagcttggctctcgagtcaattatcatttgccatcttttcgcacgtagtggcaatcggcccttgatgatcttcgggaacacataatcatgatatctagcagagacatcgggtggcccacgcgcagtgcagtctaacaacgactccattccggtcgcatagctgtgcaccggtcaccgaaaagaatcatccatcatatggccaatcgttcaatgtactaatgcgtgactacactacgagtacgtcattgaaggacaccggacattgacttcccagctcaagacaaggtcgtgcatgtgaggctggacatgaactgatacgatcgaaacgatgtatagtatggaacgaaagtttctctgggactggaaacaacctcatgagggtaaacaatgacacctgaactggtcactatctgagggctccgcctctctagctcgataatacggtccttgaagaaaacactcgtagcacagttgacctgatccctcatgcggagtcttgacgccagcgatctttcactcgtctactgtagacagagttttcatgctggggtatacacgccaaaggcgagcctgagcgcacgcctcagtcgagtaagcctgcaataggccgtttgggactagtaggctgcgtgcttggaaatcttcacctagcagtcgcgtgacaatggcttcccgactaggacatccgcctatgagttcaattcggacccggtcttggcgccaaagccaggtcgccagtgactccgtgatctccacatcttttctggtcatgaacgaccgtgccgcgaactcctcacggtaagtctccatgtggttggctatccgagcttcaagcctttgacgagcgagcgactgtctattctgaggtttatgtctgactcgtctacctcctttgtcctcgatggtccgtttgttggttgggtctatcagtgagattggcgtgtcaggcagagacgcatgactagactcagaatgtgtgtgacaagtggatgccaggtcggaggacatggcttcagcatacgatgggggagatccgcgaccggccaccggccagccgtcgttgcaagaagacgccagagtaccggcgtttcccataggaaaggccccgataccatatgggtcgtcgttatttgggtcagtactcagcggcaaactcaattctgattctgcatgcaccggccattcgggatcatcagcctgcaccgactggtttagagcatgtgagcggcttgtcgaccggaaagggccggttttggccggttttactttgcttttcgacttttgcccatgccagcctatagtacgtcgatcgcgtaccctggctcccctatcgggtggtttgtgtgtcaccgatggtggctggaacggtccagcgatgccgtacgatagcgggctgcaacccatagagactaaaggtgtccgagcccagccgtgtgaatcggactcggtagctggcatacatactcacccagtgtcgtgtcaaagggctgatatggtgaatcaggctcgacagactcgaaagatcttgagcagaggtcttgccaaagtggttgtcatcttctggagtcgctagaccgactctctcatagggccatgtatggacttcctttcatgtgacttttgcctgccccagtttcaccgcaagctagcggacggcgcgaccacctcagcgaccgcgcctcgtgatcagccgcgagtcaattgataaccccgcagtacgtcgaaagtatcaatggaagccgagcatcgtcacatcattacattcaagcgttactttcaacatacgtacggcaaagcacagtaacatgtcaatgtctgccccgcaagacgtctctcacgaaacaccttgtgatggacaaagcactgctcgcaaagcattctacttcgtccctctccagaatgagatgccatttcctcctgagggaatacaagaatgacatgatcctccggcatctcaagaccacacaagactccttgctcggaacgctccaactgccattgatgaagcagactagctccgtgaggagaattcgaattacgcctgatgaaccgccagcgaaatcggggatcgtcgaacgagatttgatcgacgctggccttgtcttccttcgacttgactcgatagcgtgtcagccaatgagcaaagtcttccatgaacagacgatcttggggcgtgcagaatccaagcggatccgtgacgctacggtccatttcatattgccaaaccgtttcgtaatccagctggacgtttacctctggacctttcgaagactggatatctggactataaatgggactgatcttactgctggctgtgagagatccagcgccagttgaggtgtcagtctgaacagtgagtgcttcgcggtctgtgtacccctggccttcagaagttccagcccgatcacctttcgcgctttcctctggctgtggtggatggttccaacttgagccaatcggcgtagttgatggatcgttgctagagttttcatctccaatgaccagtattggattttcacacgtcccgtagttggatgacgaccattcctgtgcgttgtctgctacttgaaaggtctcgtttccggacgaccgccaatccacacccttgaaattcgcgaacctcgtaaagtttgacattcggtgctcgagataaattgctaaccgagctatgtgtttgtgttctatttattggaaaagatcacagagaaaaccgacatacgtgcaaacagggaccgtgagtagacttttgcccgcagatgttgactgggccgtggaactcggttaatagctgtcggttcacgctacggagaaccctacaccaatcttggtgtggaatcacccaacaaaggatcgctcaacccatgtcacagggcgaaagcgggaatgtcagcctgagccacgtgattcgatcgttaccctgagtgctcgcaccggcggttgataacgcatcgcgggtctggcgcgcgactcgtagcgttcatgaactgaccgtgccatccaagatttaatgacaatctgtttcgaaataagccaatctggtatagatgctgtacgtcaagagactaccgccaaggaagtggaatgctgcagttcatcaatggatcgagagcagtcaagctcatagttgccggtcatgcggcgtttcccacgatctggtaatctcaggcctctcagcccgctcgaaaaggtttataatatctacatgctcaaaactataggaaatatgcattacacacactcagataatgactggtgatccacgagtaccgtgaagggctacggaggggcaaatcgagtcagtaaggcccgtctcagccgacgaagcggacgacatcgcgcgagacggagaactattccttagttcccgcggctgattctacgcctcggttgtggcgacacactcatggccttttctgttgccgtttcggaacagtcctgcgcgcttgaagcaatactcgcaaaagcccgctgctttgtaatccttctttgcctgttgctcatcttcgatccattcgccgtaccacatttgctcgccttgaaaatcacggcagatgaaatcactgatgtacctcatttcgtagagtttgagattgggtttgccattgttctttctcaactgttcctggaaggagagctggcagccagtcttatcgcgaaagaaagcgtcgaatcgcttcatgatccatgcttgttgctggtcatttgtcgttttatgggcgacccgagaagccatctcgatcgggggcagcgtgaattctgtgtcagaggccattgtgtcgatcaagtcctgcacaaactcggcatcggtaagtaacttctgtatataatatacggtgttccgtgcgccatcgaagctaactgttcgtccctgacgttccgcttttcttacgcccgaatagcctcgcggcaagatactgcggccagtgcgactgcttgacgaagatacagagcttcccctgcgccaagcgatatcagaccggtgggctagaggagacgatcctcctccgaacgtcggtgcgtaatcgccagttggagactcgcaaatggttccttcagggaggaaggaaagttctgtcgagctgctgccatcccatgtcactgcggacggcgtaggctggacgtatgcagtttgaagagggttcgaagttgagccagatgattgcggtaaaatcggggccggatggtcggttgagctggattgtagctgatgcgcattgtgaagacctgcatcgccctcagaacccccaaagggattttgcatagaggacgaggctacagatgctggaaatgtttgtgctcgcggcagatagtaattcacaaaggggtttccaggcgtccgatcgcgtaccctcgcagacgattcgtatgtcactgaaggaggactggcgcgaatttgcgaagcattgcctggatccgaagcctggctttgtcgttcggtaggtccctcgccagtgatgtgtgggagctgcgttggcgatgacgacagatgactggagtgcctagactcaactgattgatgatctatgaaggtggtatgatttgacatcaagatagcattcgggtacccaggtaaatgggggaacgatgatggcggtagggtggctgtggaatagtcttggttgccgtagtagatggtaaatggagcgggatcaccagctgaagttccctcagggcatgacattgtgccgctcggactacggtatcgttcttcgttcgcgtgcgacatgttctactttcttgaacaacgagtgatgaactgacaactctgtagacggtagcacacacctatggtctatcccgcagccgttccgcgtccttctctcttcctatatgtagacccatagtttctatgatctagtgctcgagctgagcggatcgttacacatcgctttaacaacatcctttcatcgcgtgagatgaggccttagaccgcttggatggcacgaacgtgacacagcctggcatacaatgagccgcatcgcaaggagaatgtaagattggcttcgcttagctaatcgacccacagccgtacgcatcgacatgccacacaggttcggcagggagccatcggcttctttggttcacagcttccctcaaatatgtttcacgtgcttgagtcggtcttggttcatcatcacgaccaggaatggcagtcaggagagaaaggcgcggtacgctacgggcgtgccggccgtgctgtatctactgtgcaccacgtggtagcctataggctagagcgaagagcatagacgggttcatatccatgaaccattgtacaggtcgcttctttgtctgatcccagattgtggcgggctataccggagttgacggttattgcagccttttttggctgacttgagcagggtacttgttcaacgtaaagtcacgcaatgcattcgacgtcgagtcactaggcagactcggagcaaagctcctgctgagcacggaccggtgccatggatatgcaagtatcgcatgctgatatgcagcttcacatcaggttccgatgtgctcgtactcgctagttaggaccgcgcggaattagtgtagtcccatgcgtgaccgccagcatctgcccgcgtttcagggagtcgcggagattgtccggtaagaccgaaatgatgcagtagtttgattggtggcaccagaagcatttccacaagccgttgtctcacagggaaacgaccctaacgatcgatcttgtatgtgcgtccgtccgctctcgctacgcatacgcgtacgctatacatgtgtctttctgacttttacagctgattcgtttatcccaaatatcaaatttcgcttgcatcccgatcggaagtagaatgaatgctgcaagtgatacgcatcttgcacgtctcatgttgcctcggcacccgctcgtcttgattgaagggtcagatggtgaacgttggaagagcgatgacgactgccgctggctggctttttggagactcgaccgtgcgattctttccgaccagaatgaatagtatcgctggagattccagtgccgtgtttagtctggcgtgagccttcctttgtccgtaccaatagtttggtgcttgattcaaatacccgttgctgctcaatccgatcatcggtcgccgaaggcatcaaaccaggtgctcgtatctgaccatccatcgtgggtctattaaacccggctagtgatgtccgggtctcaacaggctggccattgtagcgcggtgctggaccttgccccatgtcccaaccgtgcggctggagagggtagcttggtaccaggaaggagccatccggcccccatatctcgtatggttccccttgtgactctacattactaataatttcggtgcgctgagactctggaaagagatcccaagcgctgatgcccggatgtccttgtccgaactttgaatagacccccaaatcgcttgcctggtgtggattcgactccatcgagcccccagtctcggcattaggacggttcggattccgcgggtaaagttggtctatcggaacttcggcagaatgccaactagccgtggcttctcttcgagtcggatcgtgattgaaccgcaggtctgttggcccctctttcattaagcccgggtaagggtaacaactccaactcgctcgcgaacccgcatctgggttgcaacgaccgtgccgcaaatcctcctgctgcggtaatcggcctgaatgaaaggacccgatggatccgagaaaccccttcagggtgtacagagaggtggtatccgtgggctctgctgtatacgtgccgcttccggcttcgtggttgaaaaaatcgttatccaaagaatcgtgatcactcattgtattcctgcttatacttaggctccctgagtgagtgttgtttgatggccactcgagctgcatatgctgtacagctcacatctgctattgatagccttggtacgctggcatatatagggaacggctcgcaggctcgaagggcatttcctttcattcgtgctgagcaattgaccgcccgctgtatctctaccgaagactggaactcccttaaaaccgatgcacacgacgtcacgtaacgagatggtgcgtcctttcatgagtttcggtgtcgcaatgctcacgtcacggacagatgatcagtagaagcgctggacagatcgggagactcccgccactatgtcagtcgtgatctatcattgtcaattcggtcgaggtgacgaagtgcatgcgagtgctcaccgtcgtgcgactacttcgcgtcatatgacatgttattgcatcccagcctgatcgacacgagcgacccgaccacagtcttgagttgcttcgggccctactactaatcgtgccttgaccgatctcttccgtggacaggacatacagagtaatcggctctcactcgcggcggcttcgcatgcgttgcgatagaatggactaatcattgggtgtctccgaaggtcacactaccgtcatcgtctgctgtgatcgctcttttggcaggtcgtcaccctgtacccttccccgcttggggcctgtgctcgtccaatgggaactgctctgtgactgtccaacgaaacccttttgaagactgatggatgcgactgttgatcttccgtcgtttaacgattgactgcggtgggacacgaatatccattcaggcgcaaaaccctgcggaatccgcgtggattcatgtctttcaccgactataagctggacgcctgcacgaagcgatcgtacgagtgtctcaagcgagttgaggccggacacatgctgagatcctccaccctgtttacgaacctcaatcttcctctgccagaaactcaagtgggttggccattatatcgatatagcgaggatcgtgaattcggaacgattccacgtattcgatacgggagctttctaatcaatatattctgtccgagtattcttacagctgatgttcgcctagacccggagcaggctatacttttctgtcatggccattttaaaagctaatcctcgaatttttgcgagaaacggtctccgaatgtacgtcgtttcttcacccaatgccgcgatctgacgtggcatcggcacggccaaagttggacaaagtcaggcagtagtagtgaactggactctgggcagcgattggtatggtgatgattgagggacctgctcgtgcggggaggtcccatctcgggttgtccatggcatatcatttcgaacgtggcgctgcctcggattcatcatcccctgatcgatccatcatcttgttgtacgtccacctgccccccaacatggtcccgcgtacctcgacctgcctcaacccggatgcatcgcactccaacggactcttgtccagcacgaccaagtcggccctatccccgacctcgatggcgtctttaccactccacgtcgtccccctccatgcggtcgagatgtcaatcgcctgttcctcgtgccaaggatcctcttcgaaccctctctcggtacgtcccacggcgatggccatggcttcccaaggttgcaacggcgcgacgggacaatcgcttccgagcctcaacgggatccctgcgtccaccatcgaccggtaggcaaacgccctgtcctcccttcccggccagaatttgtgacacagcggtcgatcgtcgatcatgtgagacggctggatcgacgccgtcagcccgaggtctgcgaacaggcgtctatcctccatcttcagtaactgggcgtgctcaatcgagctcccttggagcggtttgacggggagggaatccagcacctcgagggtcttgctgatggccttgtcccccaatgcgtggacggccagcctgaacccattctccgtcgctctgatggccatccccttcaacgtctcgtcctcgtagacccactctccgtagtcgtcgttggtccccgggtacgcatgatgacagaacgcagtcctactccccagactcccatccgtgatgatcttgttcggtccgaccttgaccagtcctcgggtcccttggacgacgtccccggtcttgagaccctcgtggatggccatgtcgagatgaggttgatacaaccccgcatggacacggaggagatcgttacccgcctggatgcggcgtttccaatcgatcatgttgaacgccatctccagttcgacaatctccgtcacccctagtgctctacgtggggtcgacgacgaacggagaggttcaacggtgtcagcacgtgcccggaactcgacggacgaccgtgctcgacgaagactcacgcggcgttccgactagccctctcgaccatgtcatccacgacgctgtcgtccatggcattgacgacccccagtgcgtcaaacgcggctgtctcttgtaagtgtcccgaacgccctcgaacgtctttctccgtatatccgaaccggtggagagctggggtattgcatacgagcgagtgaaacccgttgaacacgaggacgagcccgatgttgttgtcgtcgttgtcgtcgttgtcgtcgtgatcttgaccatagatttgttggacgagggtatccagggcggatttattcaaaaggtcgagatccgtccaattcgccatcctcatatgctggcctacgacccattcgaggtgcaccgggtcctccccactatcaccgcgagcctgtatcccattgttcctggacgaggcgtccctctcccttttccttccctccaagacgctcttcatcgtgttcaatacctcttgcgccgaattgcatgtagagaggtccgtcctggattcactcatggcccaccatttgaaatggacgtggttgtccatcaaagagggggctaggtaagactgtcccttcaggtctaggtccgggtcgctttctcgctcgtcgctggtgatggggatggcggccaatttcgcatcttcctgattagatccggggtcttccaacgttgatgacagacctgacgatgacgacgacgtcgcgtcctcgtccgtactcgtcggttcgatggagatgacgaccccgtcctcgatctgtacgtcaaacaagccacgaggtcttcctacaagtcgggcgttcaagatcctctttgggcccgctgtgctcatcatccctgttagcttgtagtccttggtcgatcgctatagtgctcgagctgtgggaatggaatggaatggaatggaatatgcaggtgatgatagagtcgactagctactagttgcaacttgcaagtcgttcaacttagtatcgggtcgggttaagcgggggaaatgtggggaaacggaagcaaattgagcgggggaggcaagccgagcggaagctaattcggctgtagttaccggaagtatatcggtcaggtgcggtcgacgatgttacgatggggtgacgggtgatggtgatgtcgctgaacacggtagtagtgtcgacacagccaggtcgttgcgtcaccaccgtgaatacgagcaagaacacaattcgaggaggttgtccataccactcctctctttgactgattgtccagtatcggtggaccgaaaacacctaccttctcgctgttgaatcacgtgatgttcgctcggcttgaaccggccgagcttgccgtgaatgtaaccggccaagccccgatcgaccgaggaggacaccacacaccgtccccgtcacctaccacctagtatatatacagtagtgtcaccctcccataacaaccacactcccactcgatcaccgggggaaggagaatgatcagtctcgtcgtgtatccagggatacccacgagcgctctcgggaagagattgactcacatcggttgaatctaggatttcggcaccgggtccgacgtagtatcggaccttgtcgtccatcaccctgaatttggcctttcctccgatcacatgcttccctgggggtcctgtccgatgaccgcctccggggacatatgcctgaccgctacctacaagaggagcgtgtggtgggacgttcagcacgaaaagttcgagtttgaccggcatgtcagccgagctcgggcttacccttgtagtaatccttgttcgctcgtttcgatgtcaggggtagccgcgatgcgcctcgaacgactttggtgacgttcatggttgatgggtctgaaaatgattgtcaagtcgagtgtctatggttggtcgcaggatactggcagatgatctaccttgaacactgttgaatgaggataataagtaggtcatgtaggtgaggcggcagggcaaagcgggggggaatctcgtctacggacatgaaaaatcctaattttgacaggaaatcgatctgaatctgggatgtccgttcgcgcgttcaggcgaggggaacgttgcgaccaacctcgtaccgagactcgaatgtctaaaagtcgaatctcatcgacagctcgtagtctggccagctagcagtcaaacgaggtcatcttctcgatcaagcactcgcctgccaggaaacttcaaacgatgcatttgctaggacataatctgccggaccacaagctgctcagggtgagcgctcgaagctgacaaagtctattgcgccgggtgcaccccgaagctgatcgtccattctcatcttttcctgcaggtcgccctgacatccttttatggaatcagtcaccacatctcataccgtctactagccagacttcaaatccactcggaggctaccgtttccaacttgaccgaagcccaagtcaccgcgctctctgcctacctctcttcaccttccaccaacccgtccccggaagcgacccccatctgccctcctggccaacaaccctcgttgaagggtaaagaacgggaagtcgtcgtcaacgctgatcgggaagaccccttggataccctgaagatcgagacggacctccgacgatcgttgcagagtgatatcgcacaccacaggacgatcgggacgtaccgaggaaaacggcgagtccccaaccctttgatcctgcatccgtcgcaccaagtcggacctaacctttgctcatcctccgctattcgcttcgtattcggggtatattagacacgctgctggtctgcccgttcgaggtcaacggacgaggaccaacgccaagactgcgaaaaagatcaaccgggtcgaccgtcgagccttttcctcgtacgtgccccagccccttgtgcttggttcgaaactacgatcatcaccccctcctttgcggccatgctgatccgccctttcctctgtgatggtgctcagctacaacacggcatcccggatcgaggtcgccgtcccaatacccttcccctctcctctcatgcagaccctctcgtcgatcgcgccgtccaggttcggccgcgcataaacgccatcggaagcgaggcatgcatgcaatgattttgtacatgtggatatgatgtttccggtcgggaatgatacaatcggaaaccatgcccttgatgagacgaccctaccggtctctcggagacgtcgagtctgcacgaggtccggtcagaagggagcgagatacaagtccgagctgagaatcgaaacgagcggaaaaaaactaggcaatgtcgagcttgggcttcaaagctttgatgagcgcccagtcgctcaggtcaacctgatctcggaaggtggtttctaatgtggacaagcacaccgaggttagaaaataccacgatagatgccgggcacacagcgggaaagcttactcaggacgtcgatcgatgatcgagagagatgcgaaatgagctcgtccttctcgtcaaagctacgagaaacaccgagggggtcaggttccggattgttgtgggcacacggacatggcgaggggactcactgtcgtccgtacgacttggcggattggtataccgcgtgatcaatcttgatggccgctccagcaccgatttgcgatcgcttgacaatgtccttggtctgatggttgatctcgatcgaggaactggcgtttcaggggtaaaagcgatcagtcgttggctacaggggcatgcagcacggcggtatactcacatttttccaagaggaataatgtccttcttgcccgtctccttgtctgtccgtaccacgcagatgggagttcccgttcgcagggtaccctcgatgatgtcgacaccgagcacgatggggtcacgcttggcaaagacggcgaggatactgagtcgacaaggccagacagcgttgggagcagcatcctttcgcctctgctccatgattccggccatgtacgccgtaaaggcatcgaacaagtggtagatgattcgagcctcgaacaccttgacgttgagctcttccgcaagcttttgcgcgtccttgtcgacctcgacgtcgaaactgaggacgacggcgtattcgggcgccttttccagcatggccgcacatcgcataatatcacgcttgtaaacgggaccaatgttgatgcccatgacgggaatcttgctagtcttcaagaattcgagcaaggcttccaaggatcccaaggtactggcctgaacccacacacctcgacctgtctgatcaatgtactgctccattcccttgagatccgacatgatttcgtccatcaactcttcctcgtcgtcatcaggaccgacgaccaatagacgggatcctgcgatagccttttcaagaccaggtgccgcaatcttgataccgagagcagccttgacctccttgtggtggacataggcagactaaacaacatgcattggcgggtcagacggactgcataccgcaacatctgaaaccgtcgactcaccttgactcgcagctctcgcattggctgtggcgtcaacaaggctcggacgtttgtgacgataggaccattcagtccgcacacaacgatacggtcaccttcgtgcatgacaccgttcgacagaacgacgtcgatagtcgttccgagaccctcaatgaccttgacctcgaggacggtacactcgagctcggacaggtacatcaatcgctcgctcatacgctgttgggtcaactggaccaagagcatgatcatgtccgggataccctctccggtgatggcagaggtaggcaccaacgagacgtatcgaccaaagtccttgttctcgtcgtacagaacagcgttgaaaccctgttcagcgaaagccagcttggtggcttgaagacggttctcaaactcccgctgagtgttcttgctctgctggctataggtctctcggaaagcgccgttgggaatgggcttccagtcgtaacacctgtcgatcttgttgagcgcgacaacgaaaggagtcttcctttcccggagaagacggatagattcgagtgtttgaggttcgagaccgtgctgggggaacattcgccattagacttggtccacaacgaaggctcgactttcgtgctcacagtgatgtcgacgaccaagatggcgatgttacacaacgaacttccacgggttcgcaagttggtgaacgactcgtgacccggggtatcgatgatgagcagacccggtaccttgaagtcgaatttaccatcctacaattcgttttgcgtaacatgagcctcgggtattgccaatttcattgcggccatctttgccacactgaccttattgacgacctgtgtcttctctttgatggcactaacggggaagtaggtggcaccgatctgctgggtgatacctccagcttcgccttcttgaacattggtttgtcggatctgtacggacgacacgaggcggattgctcagatcaaagcttgcgcgatagctcgagaattgacaaaccttgtccaacaacttggtctttccggtatcaacgtgtcccagaatacaacagatgggacttcgaaggtcatccttgcttcgggcggccaacgcgtcttcgtgacgctgctttcgtcgagcagcggcctctgcctttcgcttttcagcttcggcggcagccttgcgttgagcgggagtcatctcgtcctcggagctgtcctcgtctgaagaatcgtccgagtcatccgagtcatccgaatcctcgtccgaatcggagtcctcatcagagtcggagtcggactcggattcagaatcttcctcggcggctgccttagtgactggcttagccgcaggtttggcgtcggctttgacaggagccttctcagtggtctcgggcttggcggcaggagtaggcttggactcctcctcctcgtcactgctcttgtcccaatcatcgtcagactcttccttgatatcgaccttggcaactgccttggtgacctcctcggtctccgacttgtcccagtcctcgtcgtcatcagcagcaggcttggtctcctcgaccttggcttcctccttcacgggttcgggagcagcggtctcggccttcttgacgggttgcttcttcttgtttccgtagacgaccttcttgggcttagttgcaggctgaccgctagcatcgagaccctcaaccttgacacccgaagcgagcagggctttcatccgcgcctcggccgcagccttctcagccttttgcttgggggtcaggagccttccctcttttcgtgcaaggtctcgcttctccttctccttctgcctcttgatagctcttgcctcttcggcgagcctctcctcctcagcgatacgggcctcttcttcctcggcgatacgacgggcctcttcctcagcacgtcgtgcttcttcctcgatctgcttcttcctctccatagcagccgctaaagctgccaccttggcgttgacctttttcttgggcgcctcgggctcgaccttttcagcagcggccttcttcttcttttttttcttcttcttgtcagcggcaccggcgcctccagcaccaccctcgtcatcatcttcctcctcctcatcagccttggcaggagtctcgacttctggttggggcttcttctcggcctcggcaggggcaccaccaccagcagcggcggcctcggccttctttcgctcagcctgagccttcttcttggccttttccttctccttcttcagcttctccttctccttcttggataggatcttgacttctccatcctcctgaggctcatcctcttcttcctcatccgcggcagcgggctcgggaacaggtgtggcaggagcagccggagtgacagctccctcgtcctcgtcgtcgtcatcctgcttgttctgtttctttccctttttgcctttcttgggcttgacatcctcctcgggccactcatcgtcgatatcggcaacctcggcttgttgagccggctcgacatcagggatgagcggctcggcttcctcgtcatcctcttcagccttcttgccacccttggccttcttgcccttctttcctttcttgggcttgacgtcgtcttcgggccattcgtcatcgatatcggcttgaggagcctcggcaggtgcggcaggagcatccagcacggccgacccttccatatcctcgtcctcatcgtagtctttctttccgcccttcttgtccttcttgcccttcttgcccttcttgggcttcacgtcatcctctggccactcgtcatcgatatcagcctgaggagcctcttgaggtgctggcgtcgaaggctcgtcgtcgtcggaaacgggggccgactttttgccctttggtttccgatccttccgtgaccgcatagccgactgcaatgtatattacatcttcagtcagtaagtttcacgagttttatcgcggtataagctcaccatcagaccgccgccaccaccggcctcttcgtcgttgtcttcgccaccgccagcctcgaactcttcgagcatggcataagcactcttcgcctgcttgcccttacccttgggttgaggaacatcgtctagaggagctggcgaggccagaggatcgacatcgacctccttgtttgccctatcgataggaaagtcgtaagtacgccgtcccagacgtactggacaaaaggacgccttgctcaccagtagtcgtcattgtccaaatccttcttgcccttctttccacctttcttgggaggcattttttacgcgggatagcaagattatctgggctatgtgtataaggtccgagttgaacccagatcaaggtcgtaacggagaatcgactctgatcgagcaaagtccaccttgaatcgatgttgagacaagtcgataaagtgttggttgatacatgatcgttcacggtccgagatattcgaaaagtggaggcagccaaatataagcgcgcgcttccggaggaacaggctcaggaggcttgaactcgacgatatgagttcattctcattatgatgcttgtctatgctacacctgaatccatatacaagatcgcctctacacttggtacatatgtcggtcggatcgtcatgcctctaaggcatcaggctcgtcgctctgcgctttgggcgccagctcttcgtcgtccgagtctgcccactgaatgatcagatcgtggcgacgcgatcagctagatgttatgcctactgaaatcaatcgcgccagaacaaaacttacctcgagaggctcggcatcatcgtcagcaacagcctctgaccgctccatcattgggctggggctcgcccggagaggcatctcatccgtttgagtctcctccagctcaccctccatgtcgatgtcctcttgctcagcggtaggcgtccccgctacagaatcgacaacagtcgaagccagcgaatcttcactctgcgaagaaggtctcgatataggcgctttgggcgcgagagatagtgttgtttgctttgctacctttttagccgacttgacctggccgtctttggctaagtgcgcaggccgagctattagtccaagtctagcaacatgtccagctggaaagaggccaggcttaccagcgttctttatcgcggcttgctcggcatcctcgaccttttcaaagaacgagtagctcttcttggcttgggttgtgctggcaatattcgatttagcaaagggattcgaggcttgagctttgcgcgcgaacgggttcttcaagcctgataaaacgatgactccctgagctgttgatgattgcgacaaaggatctcctcaaaggttgtgactgacctcccgatttctggaccggctgcgagactaccgattcactaggcaattgtggccgcttgaagccgtcatcttcgacatgaccgacattcagccgtctccgcttgctttcaggactagatgcagtgtcctctggcacatccagagtctcctgggtgggcaagctcatcggctctggcgtctcggatacatgacgagggacaaccgcggggtacaagggcgcccccacggaagctctggccgtgcgttttgaagtggtcgaccgaggtgcgaactcggtggcttgttgcgcagcagacagagagcttctcgaggtagctccatagggactctcgggcaggggggtctccctggcgaccattcggtatccaccgtgccgctcgcttcgctccttttctctccgtttctcctccgttgcttctcggatgattccgatcttttcttgtagacctggcaggtgatagaattgcgcaaccttggctgcggcttccatcgatttgacattgttcatcattctgacgatgtcgagtgcgcgctgcaacttgtcggctttacaagcggcttgcaccaattggatcagctccttgtcctgagacacttccaatttactgatgtcgtatgacagctcgtagcgatctttgaccaagtctcgaagcaagttgagctgcagctgttcctgcatcagcctattcaatgggcgtgatcagtggcagtcgattctggcaaggctatacgagcttgactgacttttcctcgagctggccttgtgagatgtccagattgagtaggggtatcgtcatgtcaacatccaatataaccggccgggggaagtaaggctcccgttcgttcccctatttcattgaatgatccgaccgtcagtcttgtaaggcttgcaacggggaagacccgacgacctcaccttgaggatcacacacatcatctgcttatcattcagaccaacgggccaataagccgtctgattgcccccttccttcttcacgagcgccctggtgtctaccagaggagaccacctggcttgacctggtcgcctactccggtcgagcagcgataggagtccgctcgagtcatacatggctggtgcctaacaaacacaagcacgcataccgaggtcagcctttctaatctgcccggtgcgatcacaagtggcctactccgctacgcgagaacccgatccaagccagcgtggtcttctttggcaatggtaaccggccttcttgcacgatgtcatagctgtccaaatcgaccaaggtgtatctcaggttctggcaacctaacgacatcaagatagcacgatcagctggtgcaagttgttcgcctgtttggcgttcctacgtaccgtccagactggtccctccctcccgatgtaccaaaaacaccatctcttcgctcgcgaccatgctgaccatatcctcgcccatcctccacagatagcgctgcacaccgcttccggtgaagaatcgaatgaaccctcgagaagtcgccacgatcacgctgcccatgttctgattctcgacttcgaactcgtttgccaacggcttccctccggccgctagcagcacaggctcttcacccgcaggtaatgacacttgccaatcagccccggatgcccaggtgtcgtaggctcgataatggatcagagcgggtagatcgccatcggcatgcgaaccatagacgatgccctgttcgcctgctcattcaagtcgtcgttataggtcaataaggtgctacatgcaggacttgcagggacgatctgttttgcttaccaacagcagcgagatggaaccggttgtgatcctggaaatggtaacctctacgatcggcgctcttgtcatgaaattccacgttgaccacgtgatgcgtgtcctggtccgtcacgtcgacgacgccgattatgttgaaggctgcagaaacatcagctcataccctacgcatcgttcacgtcaaaaggacgatgcccatacctagatatcgcttcttattccgcatcgccgtcgatcccggctggaaggccgcttgcgcttttgttatgccaactagaccaagcggaaccgctgggtaagacaaacgagaatgccgtctcgctcgtcctgattgacgactcaccgacttccctcaccccgttcccaaggttcggactcgcctccctgtccttgtaattcacccctccttcttcatcatcaatgatccagtcgtcgttatcgaaatccgccagatcctcccccatatcgtcgtcgtcctccccctcgagttgaccgaacccttcgccattctcgcccaacccgttctgcctcgtcgcatggacccgtggttgccgtgccggatgaggcttttccgccggtacgggatccgtccaagtggagaacgtcccatcgacgcaagcccacgagagcgcattgtccgtcggtgagaattccaaccccgtcactgtaccaccattgaccttgactctgtggtggatgtcctcgtcaacgttcagtctttcctcgcctatcgccagctacctatcgacttgcctgctaacgggttgtttcccctcggttccccagacgatgatctgatcgtccttgccgctcgaggccaagtacatcccgttcggggaccaagcgagcaatccaatctcgccgtcatgtccagaggccgaaaaattgccttgtctcgtccacgtatgccggtcgacgatagcaatatctagagatgcagatgcggagtgatgcgagtcgaccagattcaattccggctacgaagggttgttaaagcaccgggcgatgaactgaccgtgactgcgcgtcgggaccacaaagtagtcgccccttggatgccaagctacagcgcatgatagctcgtccctacgacacgacacgatcgacgatcattcaacaggatcaggtcgaattcagatctcccgctcccttccaccgatgaaccacactgctgtgtatctggcgatctggactcactctggtttccctgggacggccagtgcctcgatcgtcttcaagcaagaagcgttcccttcctcgaactcgtacacctggatcttgccgtccgaggtgatgaccgtctgcaagcgagtggtaccgagcgacaggtaagtcagcggggatgtctacggagagcccctagagccgtgagctgaggggaaaggccaaggcagtgggactgacaagcatgtcctgtcgtgtatgccaagaggctgatctcactgggcgtgagagaccgggaaggacgctgatctgcatgggatctttgatgttgacgatcttgaccaacaaatcgctgttcggatccgaccaggttcgattattactcgttccaagtgtttggagttcagtagaggatcagtcagactcactcggagcaaagcgccaccttttcaccggccttgtcgatcgctagccatcgaacggcgacacctgaagatctagcgaggttccccgcgaattcgttggccgggtaatcgaacgagcgggtcgtcccgtcctcgcatcccgtcaataaattggtggactaggatcgagcgagtgagtcatatcaaccctccgtatcgatcagaaccccgcatctcgggccgatggaggtgatgctcacggtggtcgctagacacgtgatgggatcccgatgttcgtcaaagaaacctggttccgaatccggttcgttgacgttgtggtaccggagcatgcaatcggcacctcccgtaaagatcgttctgcagcaacgatgatggatacgacgtcagtgcgacgaccagatacatcaagacacgatgtctagtctgctcacgctccatctcttgaataagccagtcgggtgactccgggtagatgggatggtccttccctgacggcggatggttgagcgaacgacatggccgtgagagcgcgcgaggaacacgattagagagacctgctagatagtgccaagattgtctattgtagatgtgcaaagcgagctctatcgattacttttgtactcgtgtcacacatcatcatatcagacttgcaactcgctcgtctgtctaccttctgtcatgatcgtgtgcatgttcatcaaacgcgtcgtcgtcgtcgtcgcgtcaacgcgtttggctctcgtaaactgactggcagtatctcggcatctaatgcgcttaactttgattacatgacgcgaggtgggaacatgccaactgccagcgcttctagttgggattcatctatgatgcccgcctgcctaccaagcagggtagtatgcgtcgaccacggcagagcccataaagagtagatcgtcgattcgatcaatcagcaatatgcccaacttctcgctttcatagcgtgtgaacaacattgcattcaacatcgcaccacccgtctatgtgtgagtcccatgacctcgacttcttctcctcccgaaacccccatccccgctccttttacatgatgtcagcttttccatccaaacctttccccaatacgcaactccggggaaaggctcgtgcggaaacacaagaaagttttatttattccaattgttccttctgaaaacaccctacactctacctcgttattcttcatctcgcttcgtttcggcccgatccgtcaaggacgaaagagctgactttgctatctcttccatccccgcctacgtcgattcaacggctcccgtcactcgatacgcgatcccggtcattcgaaacagagaacaacctgtcgtcacatcttctgtagctcttcccctgtatctgccctgatgtccctccccgtggtcgacctggctcgacaggcgaatcaagaccgtttcgaggtcgagctcgaggtatatccctcttctcgtcctactgtaacatgtcctctgaaaccgatctgacctatctcctaccgtactgtatccgttcaaatcgatccatattatcattgtcaaaacctctatcatctcggtcttgatcacccgtgcatactcttctcatatttctcgcccggtcattcggctgaacgatcgacgtccgaaccaccttcccctgcctaccctcccgcccggggcagttcctgcaatgtctagcctcgcccaattacttgtacgagctggcctccaagggctacctcgacgatccggcgtttatcaactatctcgagtacctcgaatattggcgtcaacccgactacgcccaattcatcctgtacgtcccccgtcccccgccctgacgggtccgaaccagcggactggactgaactgatccgaacgggatgttccacgcaggtacccgacggcgctgcatcatctctccctcctctcctcttcctcctcgttccgacaagcgctgaagaatcacaatttcgtggacgaactacagaagcaagaattgctcgggtggaactctgggtaagacgacccgattcgagccgagtcgagtgggtgagcccgggattgatccctcgattcattcgttttgtgcgcgggatagtttcggtactaggtttaaagagcaagacgaagcgatggctgtggtagaggctgaaaagccggtaatggagtcgacgcagtcggtgcactctgtcggcgccagttgagatcaagatgccaagcgctacgtcccgccgccttgcccgttgtaaaagtagctgaatctcgtgacacacccttcggctgactcggtcgtaatccgatcgaatcattcatccctagaatgaattagtacaaacgtccctcctgctcgtctccctccacaaatgacatcgcccgacctggcctgcccgtcccgtccctagttgagcacaatcttcttggccttcaactttctctcaccgtccttgtgaccgataaactcgacctcggtagagtacccgctctgcatcaacttgttgtcgagttcgtacccgagcacgtcctgtttaaagtgtcgtccgatcttgaggatccgctcgagcaagggagaaggctcgttcgggtcggtaggcgcttgtcgggtccagatgttcagtcggaagctgcacgggtcgggttagcgtcgagtgtcgacacgtttcaatcaagagtagaaaagtatactgacaaggctggtcgcacgttgacaatgaccccggtgacgagatcgtccgagacctcgcccatatccttgctccctgcgtcggtctcataagtctccccgatggccgctagcatctgtcgacacgccattatcgacgagttcgtggatcagcaccgctggtcgatcgtggctctcgtcgtcgagtagactgaccgtgtacaaccacatctggtcaatcgtcgccttggtcttttccttgggcaactggacgctccatttcccaccgttcttgttggccgaatcttcccaagcgggaatgatatcctcctgggaaagacgagggaggccgatgggggtatcatatccgtcagtaaacgtccgaaagtgtcggtcatgccgagactgaccttgaagaggtagtaatcggccttgagaccgagactcgagggaggaacgatattgttgtgcaaactatgcccccgaggcgcccaccaagaatgatcagcctctagtcgccccgccactgtgacgctcgacgacacttcactcacccccagaattcctcgacgctgtcaaacttggcgacctttcgcatatcctccatccatccggacgcttgtccggcgggggccgcggcggtgctaggcgtcttgggaacgttcttgacgtgcggggaggaaaagtagagggtccactgagaaaagagtgggtgctgcgtgcgatatccgagggtcgatttcgaggtcgagatcaaggtcgcgagaggggcgaggtggacggtcgaacaaaaattgattgaatcagccacgtcgtaccccccggtgtacaacgaacccgatcgtcccaacacgtaccttgacgttaaagttaccagcatcatcaaagatggtcttatccccggcctctgcaccctgtccctcttcctggtcctgcttgacgggctctacttgaccgtcgtttttaacctggaggtcatcggccgtttggggcgctccggctattgattgcgcggcggtggtctcggtgggttcggtggacatggttgtaggttgactatcagggcgaccggggcggcgagatgaattcggggtgagggattgataggtagatgatggtggtaggtgggtgtcggggtgaaattcccagccgatcgggccagacgagatcaagattgacgttcgagcgttgagcacgagaccagagaaaaccgtagcaaaccgatcatcagcctctcctgcgcctctctctctctctcgactcccgaccatacataagaactcaccgtctgattcaggatgattcctcccaaaaacgattgatctgatctatccctctcgttcgtacgacggactcttttctctctctctctcgaggtcgatttcgtttgacttgacggtggacgatagatgaacgtatcgaccgggtgtgggtgataaaaaggatctcaaggtggatccggtctttttgttcgatgtttttctcccctttgattacctatcagacgaggtccccgtcgagtttcaagtacgaggggtaaaaagtccaaggggggggggagggcggcgatccgagtcgcgtgccacggggatacgagatcgcgattgcgattgcgggtgcacgagatcggggtagagcgagggatgaagagagatggaggttgagaggaatcaaattgaagagtcagctattcacggtgttccttggtgactcgatcttttcctctgtcgaagggtgtgtttgtggacgatgacgagacgcggcgggtcgacctttgggaagaggggggaatggacgtacaggagtgaactgacggagatgaacgtgtcgaatgtgtgtgtaattgtttgttatgtagggaggataggtatcatttgttgtctagtgtggtgagatggacgatatgatatgaaatgtgacgacgtccgaacgaccaaggtgggagagagagagagagagagtgaaggggggaaaggaggggaaaggtggtgttaaacgtgatcacgtgatgacagtcagaccatgatcggaagcaaatctatcccatcccattccatcatcatcatcactttgatcactttgatcagtcgagattccagttcggaactagtttttatgaccagcctagcctagctcgtctccatgtcagcatcatctttcatcatcgcatcgcatcggtacacttcaccctctcaatatctctccatggtacaccattacctaccagctcatcctattcgagatcttccattgacctcacatgccaaccaccacctgaaggtctcggaattcgacctagtcgacacggcggaccgataacgcgttcaccaaacattccgatcaactttccccccctctctccttcggttgttcgcgcatgaaacgcgatcgcccaaggcttaaatcagagacatcatcatcatcgtcaccgcatatagtctccagggaactctacctgctatcatcctctgagtcaactagcaactaggtgtgatctttcagcgaacttgggaatatccttgtcggtcgagtcgtcgtgaagatgaagtttgctaggtgaggcaaagaagctcttggcgggcttgacgtcatgacatcagctgataccagcgtcacctcctcctggccgtcgtctacataccgtcatttctgctcttactcgataccaggtacctcgaggataattgcgtaagatccagactccccacttgactcgctgaccgatcgacgctcaccccaccccacttctccctcgcggggtagacgccggaatggaaacgagcgtacatcgactatcgccgtctcaagaaatgcatcaaggccatccaagcgcgtcaacaagcacaggacccttcaaccggtgccgacggtgctgctgcagctgctgcatctggttccaaacccggacgaacggggctcgggaacggagctcatcccatcacgtcgggggaggagagcgtggacgatgggttggacgagctcgattcctctgacagggaagatctcggtccgagcgccgatctccgtcctctacccccctcccactcccggtcctcgcagaacggcccgggggggctccgtcgaaacatctcttcactcgcgaggagcgtatctggggataagaaatggtggaacaggttggacaggcctcggccgatcgaggcgagtaatatggaggcttcgagatcgacagagagggtgcacgaggccgtagggagtgtcgatagggtgaattcgaagagggcggtcgctatcggtgcgcaggaggatccggaccacactcggggtgacaaggacaaggaatctgaaggttcgatggggctcggtcggcaacgatcgacgagcgaagccgggtatggatccatggggacctcgcccgccctgaaaggttcttcgatcggtcggaaatccaacccggttcaggcgtcccctcgaacgaggatacactccctctcgaacacgccccggatcgatcgaccgcgatctcccctggtcccgcccgagttgcacttgcccgactcgacctatcctggcgagatggacgggaacgggaacgaggatagcggggatcaattggaggatcctccttggtccgcggtgtctcattcggattcggtcaattccgctaccgggctacgacctcggcatgcccagccatctaccgaggaccacgatcgatcagggtcgccttactacctctcgacccccggtcagaaccctcgcctttcatcgtccgggacgacaccgggcggtccgtccaggaagaggcaggaagagactgaagcgctcggtcgttcagagacccggacgacagcagcggatagttcgagcggggacgaagatgggaatctggtttccaaattgccttccccgcttttacacgcaaagtcacccgtcggagggcgatcacccagactcgggggacttgggaccaagacgggcctaggcaagagttcgacattcaacaaggacgctagcagtaataagcgggaggaggtgcctggcaccggaccgaccacgcaggcgagcgggaccgggggcgccatctacgcccgtcgctttggaggagggggaggtgtagcccctcggttccctgaatctctgcaggaacttcaagatatttgcaacaccgaagagaagcgattcttttccaccttggacaacgagttggaaaaggtcgaggcgttctaccatgaccgggagacggacgcattgaggcggtccaaggagttgaaacaacaattggacgagttggcggagcatcgtcgaatcttccacgaggccgaggaagagaggatgaacgagggcaaggtgaagaaatacatcggagatgcagttgagggtgtccagaagaggataccgtttgtcgcttcggtcatccagattgcagacccgaaagcttccgggtcgaccgccacgacgagcgctctgcagaacggaaacgggaacgggatgaagcagggggagatgcacgactcggagaccggcaaggaacggtcgtcgctggagaccgaccagaatggtacgacatccaacgtggcgagaaatcgtactcccttgcacgagcggacgagtttcgatccggaaaagtatcagcggtacaagaaaaagcttcggacggccatcatcgaattttacaaggaactcgagattctcaaaaactatcgcatcttgaacatcacggggttcaaaaaggccctgaaaaaattcgaaaagaccgccagggtaaaatgcatcgatctgtacatggatggcaaggtctcgaaaaggagctttgccgatggaaggacggtggatcgattgttgaagcagatggaggacgaattcaccctgagattcggtcagttcattgtgattcgtacgtagacgttgattgtgaggatcgctgaccggttcggttcgttgctgttgacggattatagaaaaaggggatcacaagaaagccgtcggcaggctgagaggacagttcattaccaagactgtgggtcgttcggtggtgcatagggagacgattccgcgatattgactggtcgaccctcgctcagcatcacctgagtaccttttcctccggtacttatatcgggatcgggcttcccatcatgattctgggactcgttgagggtatgtccgtcgccgcttggtcccacctgacggctgaaacgctgaaagtgcatggcgtgcacagctttgcgggaccagactcgacgcaactttcctcaagtcgaggcgcttctcttggtctactcggcgctgttcttgccggtcctcttcggaatgctctttgagctcaacttggcggcctttgtcgcggccaggattaattacggtttcatcatggagctcgacattcgtacggccattgatcatcgtcaattcctggagatcccggcgatgctgtttgccgcgttggccctgtgtttctacttttccgtgcatcagattggtgaaccagtaatctccccatatgcgtgagtcattcgcatttcgtccttgtcccgggactggctgacgagataagacgctttagctggcccatcgtatggatcgtcgggactgtcacctttttcctcaatcccattccagtctactttcaacatgcccgttactggcttcttagcgttcttggccgagttttcactcccggttacagccgagtcgaggtatgtaaagataggacatctccggtgaatgggatcgattctgacccgtcattcaaacagtttattgcctttttcgtcgccgatgagctcaacagtctgacgtacagcatcggacatctttggactatcggatgtgcctacaaccgacattggccccccgacactctatttgtctgcaggactagcggcagttgggtatttggcttgctgtgagtcggtgattcccatcacaatgcctctggatcacgttgttctcatccgatcacatcacagcgtttgtgtcccggcattcatccgtttcgtgcaatgtctcaagcgtttcaaggattcaagactcaagatccatctagtcaatgcgggcaaatacgtctcttcgatgctgcaattggcccttttcacgtattggagaagtcgaggttcccaaatccacgatcatagctttgctatctgggctacgtacgtacaggatcctcctttctctcgaagcacgcaagctcattcatacctcacagagcggctgtgctgacttcgtcatacacgtcgtcgtgggacctgctcgtcgactggggtcttctccgtccgcatgcagggtatcttagagaaagcttgggctatccttcccttcgacccgtaagtccgcgcagaaacatacgcttgaggcggcagctgggctgaacaagccccttcacagtattactatgtggccatggtatccaacgtcatcgtccgatttatctgggtgttttacatccccaaaccgacgactgacgttccgctgaagagtttcatctttgccaccatggagatgctccgtcgatggcaatggaactttttccgtgtcgagaccgagcaggtcggtaacactgatcagtatcgagtcacacgtgaaggtatgtcgagcagactcgcgctggcttcccttgtgcaagctgatcattccttctcgctatacagttcctttgccttatcgaatcatccgggacgaagatggcgatgaggacgagcctctagctcgcaagcgaacccgacagcaggccaacggtttcggattacgtagcaccgccctccgcctgggccactggcgggaaaaggtcttggcgaagcgggccgctaaaggcctgccggaccgaacgatcaacgccggacctcggggtgatgatgataaccgcgaatattccccacgtcaggacgatgggatgccagtcttgcccgtagcgtcgcccgaccggatgagtttggcttccaacgaaatagaggacgatcagcggcgcagtggtatttaaagcccatagatggcattcagacatcaaacattttctttctgttcaaacacaagcatacacggccttgcacacgagagtctagacgatcagaactgtatctcatacaatcttcgtgcatcggcgttatcgataacagcgctttgagacttgtacaacatgacagtcggtacgagtgcatcgtccattcacacatcgacaagcgcttgcgcgtgtgatcagtgcatccatccgaccacggctcctgtaaaatccttgacccggacgctgcccccgttctgaagatgttgacagatggcgggaccgacgaggatgatcttgcgttcgggcgcatagaggtggttctgtagtgccggtggtaggggtcgagctgatacgatctcgccgtccgtccgagtcggtctggtggagcgcttatagatgatcgccggggctttgatggtgacagcgggtttgttacagggataaggacaagtcgttcgggttcggtcgatacgtttgaggggcgggagtgggttgcgaagggagggagaccggtcagatctggagtgagcggggaacgtgaaccctttcatccgatcgatcacttcggtttcactacgacgaacagaagtacaaaggcaaccgatgttagcattaacctcgagttggtctgctcgtgcgataccgataattacatggacgaagatgattccgcttccgcttcctcgactcctacggctgcgctaggatcgagcaccttgatctattaatgcgattatcacacagcgccgataagccgaccgtatcttccgctgtcgacaccctttcggactcacccccttgtcttcctcttgccatacatccatccgaagaggtacaaacacctttcctccgaatctgtacgtccgtttggactggcctacgtcgacagaggagaccgtccgcctatgcatcctcatcccggatcctctcatcgcagtccccgtgaaagtggaagtggaagtgaaaagcttgtcaaacttggtaaaaccggtagtccgagcctcgctggtcgtcgtcgtcgtagcagtagtagtgaccaacgacgggctgggaggtagaggagggagagacgtcgtcctcgtcaagatcggcctggcggtcaacggggtctgcgggagttcctgcgaggtctgatctatcggatgtcgggcgatagaagagtcggtcgagttcgagttgaaggggtgggcgaggctttcatccgaggtcgaagaggaggcggtggagatggtcgaccataacgagggggtgcgggaatgcccatcttgaccctgggaggatcggtcggaggcgtgctcattaggaaagagcaaggttcggcagttcatcgttggaccgaatgtgccagcgctagtgtcgtatatccagaggaaaggttatttaggatggcggataaggcgtcttgtattgctagggcggttgtgtgtcgctgttcgggctcgggatgcgctgagaatgaacggtagttgatggagcagagagatcgtaaggaggtcgtcaagttgagagatcgtaaagttcgtgattgcgatagctgagaaccgattcgtgcagggagaatacgattgaatagaatggacgttcgatctttatatccggggatgaagcgttgaccatgtcggctgagatgacccttgaagctcaacacgctcatcggcgatcaagttcacgtggctctctatcgtcacccctgtcatggcactttgtcttttttgtgtgtcgtccatcgagatatgtgcgaaccatttctattgtgcgcttgtaaaggaaagtgatgacaatctaccagtattctctttgtcgtcgtgacgagacaggggtcagaaaggattgatgagcgagatgaacggtttcaagagtccatttgacagagagagagacaggaggctgtcgatgagctcgtcaagtagaataaggatcgtgttgtgtgtgtgtgtgtgtgtgtgtgtgtgtgtgtgtgtgtgtgtgtgtgtgtgtgtgtgtgtgcgtgccacctcgattattctgtgaactcggagcttccctctcttccccctcgtcgccctcttcttgctgtgcgagcctgaccaacctctctcgttcggttttcaaattctccgactcttttttggcgcggatgatacggagtgctcgggcttttgcatcttcatcccccgcgcccagggtatccagacgtggacgatccgttcgctcgtcatcatcgtcctcatcctcgtcgagatcgtcatcgtcggaaggaagatcagactctttcaatttcctcctccaatcggcgtgtttaccgaattggaggagtgacgggggttcggcatggaggatcgacgttgtggtcgtggtcgaggtcgtgggcgtggtggtcgatcgtgaatccgggtcgatcggaacgagttgttgtgctttggatttcccgtacacccgacggggtacaggacggggtggagatgacatggtggctggtgtacgtgtgtacgatgatgtacactgcactacatcagttgatagcaataatgatacgatggtatgatgatgatatggtggcctggtgacctggtgacctgggtgaatgaaccgacttgatcgacttggtcaaacgcgtcagtcgcgtccaaacgcgtgataaagtgaggcatagacacggacatcaaacacaaaaatatagcaggatgtccgcttcccgcgctattcacggacatctcatcatattcacacatactctgatgtccgcttcatcccctcgtcgcccgtcgtcgaccaagcattcaaaaagggtcgacaaccatcatcacccacccatgactcttcccctgttttgctcctcttcttctctcaaccctcccgatacctggcaacaatactcccacccccatattacccacggatctatcgtacgcaatcggcatttcatcgtacccctcggatccccccaaagggaaccgcgggggttcgagagagggcagaacgatcttatttatttatttagatggacgggtccgtatctcctgctcgctctcggtcgtcctttacaaaagacgaccggatgtggtcgagtgggtcgaagtgtctcgaacagttcatgtctggtaacctttgatgcaacaataatatatgtaatccacatctccttggcgaaccgaccccgttttcccggtttttcgtgttcacgcccgaactggacgtccattcactaattccaaaacatcgtattctcaccgagcccgtatgctccgagctcatcgaccccaccctctcttcgaccttcgatccatacatctccctcttaggcctcttgagatctacacacctcgattgacagataacccaccgtctagcaccaccttgacatccaactcccccggcccccaccctcaccctcttgactcttgacgctttgtccggtccaaacccagtacagttgcccttttgcgtttatcgtttatcaattgccggaaattcaggccaggcgaggataagcgagtcgtctcacaggaaatcatagaacgagtatcacctcgacctcgactttgatttctttactgcaagatccatcgtctacccctagtcacctctgagagtctagtaagagtacacactcgttaggcccggggtcgagcgtgggataagggtcgatttgaaggtcgtataacacttcaagtcaaaccgagttggatcaagtcggattaggagagcgcaatccgaggcgtcagaaaaaaagggaaaaagagcaggacccaacaatgtccaacccggccgacctgttcatcccatttcctcaccccgctctggcttcgggttcgacctcgacgtccggttcgggcaagaagggcaagatccttcaatctcaatctctatctcaatcgagggggacgagccggtcaaactcgccagcttttccgctcgagcgtgatccttccacgaccgcgtcctcgggtctcatcacgacgacgacgacgacgacgagcgggagccggacggtcgaggaagatgaacagatcgctctagatcgggctaatcgatgggccgaggagaagtactggaggtttcaacccggtgggcgagaagagaaggaggggaaacgcggcaaggtggctttggctgggtattgtgagtttagatgatccatcttgcccggctcgcttgacattcctcgtcatcgacgtcatcgtcgtccggctctccagggatgtcacagagggttcctgtgagctgaattgcacctcatcggtcatcatgcgctcgtcgaacgctttcggggagacagtgggctactcggtcgtcgggtatacaatcaccccggcacgacctggcgtgatccctcccaatcctttctacccgccttatcagaaccaagtttcgacttccaccctggcgcaatcacagtcctcgtcacatgagatgagggactcggctgggtcagtgcctttccccgagtacgatccgagatgggcgtcagggaggaaaggggtcaaacagatcggaaggttgcacctggtcgtagacgatagcagcgtgcacgggttggtgagtccaagcttatcgatctcggcccgctcctcgagtcccaaccaagatctgacacggtcggcctcctccctcagacggcctcgcaaacccctctactgcaaacatgggacttgatctcccttcaaccggtcaccccggaagccttttccaaagcctgcaccgagctcacccgaccgggagcgaatcaggtggggatcatcaccgtcccgacaaacgcgtcgaggttgcctttcaaggggatgaagaggagtctggtccgggcggcactgaggcacggggccgtcgtgagtacctcgtcccgccatgtttggacggggcgaccgactgacgtgcccttgcgatccggttgtgacagttcgagatctgttacgcttcggctttgggatctcgcggggacgaaaaggccaggcagaatttcctcaccaatgcgcgggaagccgtccgggtcatcatggccgtctcgggcggaggcggacgggatggggtggatcggagagggaaaggtgggggtggcatcatcttcagctcgggtgacggagagggagtccgtggacctgccgatctgatcaacctgtgagcataccatcagtgaggtccagtattgcgaggacgacatgctgaacgtcatggcatttcgaattgatcagcgctacgctcctgggaatgccagcaaatcaggcgaaagaggccgtcatggagacgccactcaaggtcatcttgcgagctcgtgagttcatgtctcagcatcgtccgtcaataccgtcgtctgaacgactcctcttcgacccactttgccagacgcacgtcgggcatacaagggagtcttgtcggtaccaagaatggtcatgccggccgtggtcgacgactccgaatcgacgagtaaacgcaaggcgagcgaaggccaggtcgcggatcgatcgaaaaaggtcaaggcggcatgagcatcccatcgttgcgtctgaacgtgcccctgggcgatcataggctgaacgctggcggggtgtcggccatgcgtaatcgtgtatcgtcataaaaaggtcgtctcgcaataaacaaataaaagtcatcatcgtcatcgtctacgttctgctgtcgacgccccacgccttcatcgtctccaccacccgctgacccacccccagatccccttgcccacgaccgctgcagcctcggcggtctgactgggcgtaggaggttcttccccgatcttgtgacgtttcttgtaatccgccggatgctcaaactgagaggccggcagagaccagatgccgaccttggccgatctgtcgccaacaacgttgtcagaccgggttcagcctcgctcaacgtcgcagagctcggtgaccgccaggaaggatagctgcgaactgccagactaccgttaggatggacgactcacttggcgttggcttccaagctcttgagcttttcgagaccccacggcccgtactctgctcccgcagactcgtagacgacggccatccccctcttgagcatctcgataggcagaggttggtccggcaatatccacctgcgaacgtacgggatgccgacctgccgataaaccagaatgatcgccgagacgggatgggtatcagcgcttttacgtatcgcatagcacgggttttaagcgagagagagccaccctgataatgggggaggaccgtgtgggcaagaatggaggcggactcacgatccgcccgtactgatccctcctcaagatctgaaccttgactcgttttcgagcgggttgcaagagtcgctcacgcagccagtctagggattcttgcgagtgcgcttgagccggtcggccaaagtgtgcggtctgcgggatcatcgaagtcgaagaacactacggtcagggatgtagatttgtgtgggtggggaaccgagctgacctcgggggcgtctatccctgctatcctgatactgatcgtctgatccttgagctctgcattgtcgcgcagcataccgagcgtaccatcagcgactcgaatgtcacgcagcattgatcttcataggtgcgggcttacctttcggagtctcgggaacatgtctgaatttgaaggggtaggagaagaatggacctggggtgtggtatatccggaatccatcgccgtctcctacactgttagacggaccacccatcagactatgcgatcatctttaacggatagccggtcgatgcgacttacgaggtgacgattcccctgacaaactttttattctgtatcgttctccctggtacagcctcggcgttaggtatccgcctccagtaccttcggtagaagaacaagctcccgagtacgagccctgtcgttcctacactcgagacgaccgcgaccgatgtaggtgaggccagaaagtattcctctagcctgacaagcaaggaaggatccgtcgggtagaccgaggtagcgggtgtaggtgtcgatgaggaaaagtaggaagtgatacgttcgagtggggatgaggtagggtaagagagatgatgccgtttcagttcgacttgcgaggtcctaagtgactccacggtcgtcgacccgggtgatgtcgggttcgatgtggtcatgatcttgagcagtgtacacttactcgtcgtcagagctagttactgtaggtttggtcgataagatcaagagcaggacgtaggggggtatgtcaagttgatatcatcatcgatcacgaccatctttgctcgtttctctccctcggcgcgagactcggtcaccaaagtttcgcgaaaccgaagaaagattcaaccatcaacttgttcctgtacctcgtatagcttgcaacgattcaatcatccgtcgacagtctcagatcagtcctttactagttgtgaagccgcggactcgaagctatcccacgatgagctcggaaaccgcgatcgctatggccccgtcactcacggtcaagtctgaagcaaactctggacgtccaagcatgttccactcgtccaagcaattcatcgaggctggcgacctggtcatcctgcatcaggtcagttcatcaaacatcttactagttagagaatgggcgatatgtatacgagatgctgatcccgaattggcatcaaacatcgtagacacgggacaacctcttggcgatcactgtcacaccgggtcaatttcatcattcgaaatgggggaggtacggacatgacgacatgatcgggatgaggttcggcagtcgggtaagaattgttactaggatccacaatgttctcatcatttctcctactcacccacgcttgcactcctccgatgtatagatggcctcacccgcaccgcacgccgggttcatccacctgctccgcccgaccccatccctctggtccctctccctcccgcatcggacccagatcgtctaccttcccgacatctccttcatcatgaacgagctccggattcgacctggtagcaggatcatcgaggccgggacggggagcgggagtatgagtcattcgttggccatgaccgtcggaggggacatgggtccggatgtcgacgtcggcgtcagcgtcgaggtcgagccggagaagccggttgggaaaagtaacaaaggcaagggcaagttgttcactttcgagtaccacgcgacgaggttcgaaaaggccaggtaagtgcgatgatggcatatcacaactcggaacgcgacgacgagtagtatggatcgctcatcaacccaactctttccgctcgtgatagggaagagttctctgaccacgggttggaaaaagtcgtccagctcgaacaccgcaacgtatgcaaggatggtttcggacaaggtccttccaagatcgatgccggtcagtaacagaccaaaacgttgcctcgaatatcaagcttacccagaggctgagaaccttattccactccgctatcgcctaccgtcgaacgtatcatgcactcttgaacagtcttcttggatttgcctgcgccatgggaagccatcccacatgccgtgcattacctcagggtgagtccctatcccttatctgctatccgaggacgttgagccggatgactgatcgttagcgggaacggtcgcaggaagacgtatcgacgaggatctgtagtttcagcccgtgtatcgagcaggtgaccaagaccgttcaagctttggacgctcacggctttacccgtaagttcggaccagtagcaggcttcacacattgtcgcatggctgactcgtacttgcgtatgggctcacatggtagacattgagatgtacgaggtactggtccggccacacgaggtcttgcagaccccaccgactttgatctcgatcgagaccgtgtcgaatcgactgaagcgtcaagaaatcaagcgtgaacaacggcgccaagtacagatcgacctggcgaggaagaggaacgccaagctcaagggtcatcaagaacccgctcaggctcaaaaggggatggatatcgagccgggcgtggtcgacgcaggcgaggggaaacgagctcggagtgagcagcctgaggaaggtcgggagcctaaacggagaaggacggacgacgtggacgatgcgaccgcgggaacggatgccaggagggccagattcgaggaccttcgtcaagaggaagaagacgaggacgtggctgcgggcgtgacgagctcgtggaacatcgagcgcaccaattgggtgaccagggtcgtccccgaggttaggggacacacgtcctatttgacctttgccaccatgttccctcgctccgtcagggaggccatcgagaagagggaactcgaaaagaagaaccgagtcctcgtccgaaccgccgaattagcgggaattcctactgaaggtggtttggcaaaagccgtggcgatgagggcggtggccggccagtcttccgggatgtccgcggcctcgtccacggcgggcagtatgggcagtctgcccggcacgtcagataggacgatcaagagggaagagagctttgatacgcaagcgagcgatgggtacgagcgaggtgagttgtcaaagggaccaaggacacaaggagatcgatgcgatagttgtgctgaaacgaacccctcgactgttgctcgggaccagtctttgcttcgatgacggaagaggactttgcagctctaccgtagacgatgacaattgtaacatgccgaatcaaacggatgacattagacggtgaagttatagatccttacgatatgtcagactgaggtgatcgaaaatggacctccgtatcactcgaccaatcgtcgtttagtagtaaagtgtcaacaggttcagagtagattttgcgccagttgtgatcatgtcttgcaaaatatgcaaaggcgatggacaaatgggtccacgcacagtacgtgactagggtttggcgtcgtggagaaacggcagactattcggccggaggggggaaactgggaacgattcgttcaatgcaaattggccggctgtctgtcacgcacgggaccattgccgggagcgacgacaccaggaccatgtactaaacgaacggttgtttgaactggacatgaataccatcatcaagaaccatacaaatatagagatacaggatgcagggtcaataaatgtctccttcgtttagtcctcgatcgtccatctgtcctccggacgagccggaagtagaggatcaagggtggaacgaatgcgtgcctcgcccgaccccctcggccgtcacccgtcacctcaaggagaggagccgttcgacggttcgagtttggaatgggaccggacgacggttgtctagaccattagcgtatgatattccaatgataagcaagtaagaggaagggtcgttgttaaatgtcccgctcgtgataagcaggtgtgaccggtctctaggcaaatgctcttgggttgttcgtcggaggaaatgttgggccgaacgcgttatcgattgtgtgatcggtgagcttgattgaagagccgagggctgtcgaccggatcaggcatggcagcagtgaaggtttgaatcgctagaaacgaaagtcaactccggcttaagccatcgtgatccatgtaacgaaatggatgtgcttgcatgtgaggaaactaagggaagaagaattgagttgatcatcaaagccccgctatgcatatatatactatcctcgagacggaaaagtacgcgcgtttccatgattgacttcccttttcacgtgaatcgacatgaaatggcgccaacgaatgcatcgagtcggttcgatgatcgcggcaatgcgtgagaaacaacatatgtagctggacgagcgacaattcacacattctcgacgttcagaccacactaaacgagcaaacgcaacacttgcacatgatcgttaccagcatatgtcgtttcgtccgtccagtctactcatcaagagctgctaccgtgattctttccagcccattttttccaccatgcgtcgaaccctccactgacggtctcctcgacgtccacgccgagctccttcaactcggtcacgctcaattgagtgttacctggtcttacaaccccagacgggttgggcttgctcgccgggtcctcggcatcgggaatgacatgcgcagtcgacgccccggtgtgagaggcgatgatgaccaattgttcgtacttggtcagacccttttgcgacgagtagtgtacgatggaagggagtggtttgtcaagtcctggaagatgacaattgtaatgagcatggagtgcggcagaacgagttgcaccacttgatctcggcgcttacgggttaaatcgtaaatgattcgggcgacgtcctcgacacaggtagggaagcggacagcaaagtggtccactggtgatgatatacagtatcaggccttagcgatacttggcatggccctcaaagcgatagaaaccgactgactcgtatactttttgccgctctgatcctgcaagatgtccacaaaaagattgaccgctgtttccccgttatactccacctccccgtaactaatatcgaaatccacgttcgttaatgtttcgcccgtcagggttgatagcagaggctgccgcggccagacttacagtaacggtactcgaagtacgaccaatggtcgagcctgctccctcgctttccctctgacgtcaagtactgcctcctcgcctgccctcttcaaccttccgtataggttcagggggtacggcgcatccccactcgagtatggcggtttcttgccgtcaaacacgtagtcggtactgatgtaaatcagcccgaaatccagctcagcagccaactcggctaacaagcgggtagatgcctcgttcagccgggttgctctatccggatcagcttccgctacgtcaggtcgtcgttcagcagcgcagtggatgaggaaatcgatcttcctctccggatccgcttgaagcgaggtgaagaatgaccgtacggcctgatcgtccagcaagtccaggggtgtcggcgccggtagatccggatagatgatagacgccgaggtacgggaaaaggaaaggggcaaggtcgagatggattgactatggaagtgatgggttacggctctgccgagaactcccgatgcgcctggacagcacaggatatcgtgcacggtcagctcaacccagataatcctgttttcccgcgattgcgccattcaccggtgactgcgaccttcatgtttcgtgattgtgtttaagagattccaaaggtattccactcttggggtttcagctggaaattgacagagggccaagatcgatgaggcctagacggttcgaaggcacactggatggttcatgaaagctccgacctggtctcgctggcggtcaaagccgaacaagcatcacatcacgtgatcgacgagaactcgaaggaagcggtcattatgtcagctttgaagcccccaattattgcatgctaaaattccccaacaacggtacagtagacggcataaggcatatacagttggcgggaggagtgcatgcatggtgatcaccaacaacgcgagccgattgatagtaggcttgctctatgggcgattgtggccgtgccaatatctcgagacgagagagtcgtttgcgagctttcggagccttgaagctgacgcgtatggcgtctgaagatctagagctttgctatgatcttccaggcacgccttgattccatgaggcgcttccagccgtcttgcttgagcgacggtggactacttggcagtcccctcgacaaaggacctccgtaatgaccgtatgctcagccttcggtatacttgactcgaatacctcttgatcgcatgttctgctcccatgcagccttctccgaagcttcctgacggcgctcgttttgcaggacctgaatgggaaaagctccgagtcagttgtgaacgaattgttcgcgacacgcgcccacttgccagacgcttcatctgctcctgttcctgcctagtcctttcctggtgagacaacgagttgacggcgatagcggagtcgacaggaatttccagggaccggatctaggttgaagattgcacatgaacacccttgttaaccgcaagagcgcaatcttctaatcacctgctgcttgtttcccttcttcgagagtaaagagaattgcatatggttcgtcttaggctcggggggacctgaatcctgctgtgcttgttgctgctgtcttcggataagagggacagccgtgtcaaagacaggaggtgcagtcttgcggtcgacttttcgcgcatcggtggtgtcggccaacatctttgcaaactcgcggttgaaagcatcctcttcttcttgatcgtattcttcctccttcgcgtccttgatgaggacgacgttatcatcgtcgtcatcgtcatcatcatcgattctggcctcgtgaacattctttcgatcacaggtcaatgtggatactcgctccttccgagtcggaaagtacttacttcggccgcatcgacgtcttcgtcttcttctttatcgtgatcgcccctgtgatcaccttccgactcgccgtccgactcttcttcgtcctcgtcatccggcacgactggacaacgagaccatctgagcgaagggactactatgcaactgtcaagtcactcaccgtcctgggacatggtagcgagaagttcgtcggtagcttccgctgcctccaagaatgtcttgaaaggagccatcttggggcggatggtctatcgcatcacaagcccggatcagttggctcccataggccatagggaatagagcgaaaactgtgtctcacctcgagcgtgtcagacaacatgaattccacatccatcggcatctcttgtttgcataggcagtatagctatcgcgagcagagaaaacagtcagccatttgcgctttgagcagcatatcagctcgaccaacctggaagatgataaggaattggtccaactttttcttgctggaccccttgtcgaaacaagcaccacatgtatcaagcagagcgcaaaccagtcttatccggaaaaagtcgtccgccgagtcgagcggagacgaacggccgggaatgggaaggccctcgactaacacagaggttttgatttagcgtcggaatgagtgagacgacagaaccaagccgacgtaccgtgaccaaaagagatgagagaccatagcacgtcaaagatgacaggtgtgttgactactctatacatgtagagttcccccaggtattttatggtcgatatccgacgctgattatatttgaagatattatcctacgacgagctcgacttagcccagaatcaatcgcgtgctattttcagtagacatacctccataccggctcggacatcctccaggacctggtcaacaactgccagactgaactccaggtgatatttttgcaggtcgtacaccagcatcgcgaccagcgggatattaccgtatttcaactcccaaatctcggtaaaagctcggaggatgttaaggtatacctggttcgcagccgattcagttgaatatttaaacggcggttgcgggatgggactgacacacctcttgatcctcccagtgcaatttgcggaagagcttgagaaccttgtccaccgtcttcttcatcaaaacatcatgaagaagatgttcaatgaatgcctctattggggtgagctgcacttgttcgcgttgtacacgctcgggcgggttgcactgatagtatgcattctcgaggaccagttgctgtcgtgtatcaaagtgctgagcagactgcttgcgtcgcatgatttccacctgcgagaacgagcagtcaattttccgcttcttccttgaattttcgcactctcaacggaccaaagttttggccttctccttggtatcttccgaacggagcaagaatcgtccgcagctctcgagcaaattggcgacattgtcgatgtttggcccggtcaggtcgctcacgcacacctgcagtacgtgcagaatcgtgtgaggctgagctaccttgaacttagccagctcggcgtagaaccgaatgttctatcataggaagccgtcgtgatcaggtctcagcattggccagttccaccggtgcacaaccgactgaccttgattcgaacggattccaattctttgacgagcttttttcgttgcagatacttgaactcttcatcaagctagtagtgcccattcgaaatgaacatcgtgccttctgtcctatgctctagtcgcgactcacgatcgcaaccagacctattccaatatccggcatataattgtttagcgtagcagcgaaacgtgcgtaatgcggtaagagatctgttcggttcttgggaacgcttcccaggaactttgcaaaagcagagctggttcagcaatcactcgctctcatcaatccgaagcggaaacgcagctcaccttgtagcatcgtttccgcgccggtttcgagttgagataagcaaagtctgcggcaagcttgtcaatgatcgtccgattattggcttccgggagagcagcgaaaatagctgccagccgggcagcaggtcctgactgtaatggatcgacatcgtcctcgactacaggaggtctgtcgtccgaatcgtcattcaacgtcgctttgccgtcctcgtccgtgtccattggtgtatcttcgtcgatatcgtgtagcgataataccttggtaggcggagacaaaacctccggttcaaccggctcgacttcgccattctgcttcaacccgagaatgctaggcggcacctcatgagccagatcgagaatgtcctcgtaaaattttctctcctcgtcatcgtcccagatacctcccgccaggtgcatatcatcgccatctttcccgaaagccggaccagaatcgacgatctgtaaagaggtcttggagataccgagagcggtaggcgcatcgggaaccttcatattcaacaggtccgccaggctctggacaccgttttgcagtttctccaccgctttgaccatacgttcgtatgcatgttggcgatcttcaaagatctctcctgccttgatataagcttcttgattcctcttgtcttgctctagcaatttctgtaacatgaagatgtcaaccggtgcgactggatatagggggagtactcgaagactcactgtctgacccttgacgagagctttcccggccgtcttgaagtagtcttcaaatgcttttctgaacttttccctgaaagcgatagggacgaactcttcgtcggtcgactcttctttcgccgctgctgcggtgtctccctgttcgtcgaggcccaagtaggcacgcttgtaagatttgagaaatgtgaccaagagggggatattgttgtactgagggtcgttcgacatctagacatcacagcggcgcaagcgttaggaccaggcactgcagccgcagccaatgctagtgcgagagcgacataccaggtgagttaaacgatccaagacgaatgtaggcccgatctcctctggcttgatccccttcatagccttcccaccttcgtacccttcccaagcaccgaccagagccagctcggcgatcatccgcaagatgggccgcatgcgggagatgcgatccttttcctccttttcccggtccttgtcgtttcctgctcctgacgtggtcggagcagcattttgagcttcgttggtgatggcgatcagctcgggtaggaaagtgggataaaaatcgggcgtcaaacgagcgtgaagatgggtgaccacctggagaagaaagggtcgggttcatctatagacaacgtcttcgtcgcaacgttagtcagaacgtacctctacagcgccttcgacatccgctttgactttcgcagcggtcccagagataccttcgaggaccgccgctcgaatctcttccgtgtactttgtgagcgtaagtccatcgagctcctttagaaaagcatcggcagaagtcgtgagcaaggcggatctcagtcgattgagcaaggtcgtgtgcttcttcaaggacgagtccagaggaggtctgacttctataacgacccatgattgtatagttctcgatcaggcaaaacacatagtcgctacggtcgactttaaactcactcaacgcatcatcttcccaatacttgatgttgttctccttgagcgttttgcgtttagctagcttcgctaggtagtcatccttgatcggcggcggtgcagctgcattagacgccattgcctgctatcaggcctttcgaaatccactgctgtattcttagttgtatcaattgaactggacaaggttgatgaccgtacaaagggtgattttcctctagcttgaagcagctagatgacgatcatgatttcatcgagatctcgctcggaagcgcgtgccggtatggatatgacgaaagtagacaccagaccataatagtaaaaggtctacaatctcgttcaacatcgcacttttctcactgtcaagctctcgtttctggcagatctcgatcggcaatctcacagtgcatattctggccgagagatctgaaccgtagtttcactccaggcacatacgtgagacccacaggggacatgtcctttttcactccctgacgaatcgctaatctgccatttcttaaatgttgaacgacacttctacgcgggttccgatctcgatcgagaagacatactccatacaagtgccacaaaaagtatagcaagatactcgcagcaagatggagtcgaagatcctggccgcatccgattctgggcaagccccgcagctgtctatactcaacgtagctctggccttatcgttcatctcggttgacgccatcttgtctgtcatcttcaatctcggcatcgcatcctccttgatcgtagcggccgctcgatgcgttctccaactcagcgttatgggactggtactggacaaagtctttgcggctgggaacatctggggagtgttcgggatcgctgcgttgctcaacgttttaggagcgacggaagccacgttcaacaagtccaagaagaggttccacaacatgtttcccatggttttgctcgcgatgctcagcgcgacttttcctattggaatccttggctcgcagtacgccatggcggaacgtcccttctggaagcctaaccaattcgtaccgatcatcggaatgatccttggtgagcattcagggcgatctttgtcgtctcgctcgatctgaccacgaaatccccaactaggtaacgcaatctcggcgatcggcatcagcatcaattttgtgcacaaagagttcacgtaagtgctatccacccatttgccggatcgaacatcttccgacgagtgtttgccggattgtcatagtgagaaccgggacaagatcgagacctacctcgccatgggcgcatcgaggttcgaagcgtgcaaaccgatcgggaaagaagctctgaaacttgccctcttgcctaccatcaatcaaatgaggtatgagctccatttacaggctggagacgagcagtcactgatttgcttctcttggacacgctaattcgcagcgttatcggcttgatttcgattcctggtaagtctcttctagactcctgatcgtctgtctgagctttgaacgacactcactctttgccctcaggtatgatgactggagccttgattgccggaaacagcgtacagcaggctgcccggctgcaaatgatcatcatgttcagtaagccagccctggactacaactactgtcgaatagtcgagccacttcgctcatgactccggtttattctgctgtagtgatctcggcctcgtcggcattttcggtcctcttgaccatcttctttgctttgagcacgttgacggacaagcaacatcgtatcaggctggaccgtctcaatgccgagaagccgctcttttaccgatggcgagatgcagctggagcagccgtatggaacgttatccgtaaagcagcgagcaagatcggaaggactctcaggatcgtcaagaagaaggaatcgtcgagcaacgcttcgccgtcggagaggacgagactattgcccgacgaagcagggcgttagatttggtattctgtagtcgtacatagacatcaataggcttgctccggaatgacccatatcgtctcggctagacggccgcggtctcgaggccgccaaagatgctccgtacgaaacctctccagtatcccgtcttggcagatccacccacgacctcgcctccaccgaccttgccacgagggcctccagtgattcgacctttggcaacgtgcgacgcaggatagagagcgccgtgcagcccagtcgagagcgtccccatggcgatagtcaataaaccccaaagagctccctgtaccagcggtgagaatagctgaaaagtcgatctcatcagtcgtcggccgcgttaaagatctaggttctttctgcctcacctgatctcgcatggtgacccaacctgccatccgccagtcgaccgtaacatcccttccacagctaaaaatctcgtcttcctgggcggatgtgacgagacttttcgaatcggaacctcccccagtggcactcaggtgggaggcacggacgccagacgtgctctctgtcgtttcggaggcatcaggcttggtagactttccgcccttggggttgagaaagggtcggattgagacgaggtaggactgtacgtgcgttcaggttagatagtcgtatgtcttccgatgccgggaatcaagtcacctgctcaaatctaccaggaaccggttagcctggccttgacctgtgtcttctgaaagcaattcaacttgcctcagatccggaatgacaggaacgggccgcttgggcctgtgtcggtctcgtctaccagagttattgttggcaggcgataactcgtgcatggcctggccgtgcgaaggcttgcctgacctggaggggaaatgctcgggattcaacgaagtcattgatatgatggatcgtgtcttgacagttgtgatagcagtgatgtccagttacggtagagtagggcgagtatgtacaagaagcagtctactttgagccaactttatgtcgatcgttactatattagtatccaagtgtaccttctctcctactctggtaccatattcatgacgtatctaatgccggatcttccgacaagcgcgaaacgcgcctcaacctgaccctcatcagatcattgccgcatgattgcagcaacagtcaaagaagtaagtgttatatgctgtctggtattcattttacaaatatgcaagagtgagatcatggatgagagtgtgtcaaagaaacgccatatcgaagatgccttctataagaccccacggataatgcccagcaataaccttgcaggagaatatttcgctgacaggtctgcccatgaagcgcctagaaatacgggtgccctatgctcaatggccattctctgctccgatcgttctacactgcgaactcaccgaatccggagaatatcgcgccgagtgataatggtacattctgccaagatgagccggttagctgaacgccgcctgacaggcgagaacgtaagcacggacatgcagctcgagatacgggccgacgatcgggcccttctgtgatttcctcaactccaccctcactccgcctacaaatagcacacttagtacctgatccaatattcggtcatcaccgctcgtatcgactcacccggcaaacgtgaaggctctttaatccgcaacatcaacgcgaaaagggggaacgagttgataaaggccaaggcagtctcgatcgaaaagctgcatgctaaaagggcgatcttcacctaatcaccatgcttgtcggattagttgcgatccagtaaccggatccttccattcatgctcaccagtgagaagaaagcgtaataagtgaagatcgttggtagaaggaagatggtaaccgtgaagaggagggtcccaagaaacagctgatcgatctcgtaatcataagagtccacacgatgtctcaaggtattccagcgtttgcctgagagcgttacatcagccggtcggatcgacaagacggcctgcgaacaggtgcaactcgcctcgaaacaagttccacagcgagtacatcgcggatacttcccatcggtaaatctgacgcatcatccagcttatcacggtcagatgtagcgcggacaggcttatcaggtcttgaaggacagagaggaacatgctgcctcccatatagctgcccagagcgaggacagcaatggccgccgggacgagcgaggacgagccggtccagatcgctagtctcgcgggtatcgttaggatctcggcgtgaccagggagtgcggttcgtatgtatgactcacaatcccaaatgccagccatctggctgaaattgctgcacaagatcgcgctcaacggagtgttgagcttgagaccgaccggccaatcgtccagccattgtaaggaagcctgtatcgcttcaaccagccagcgctatgtgtcggatactcgagtaagctcgggctgacgctggtctcgtatcgatcacgatcacataccttttggaacgaagctataggtttcaccagggaatacttatgtgcatcgagcacgcggacgatcgtccagccgaaaatcagatcgttctggggcaggacttgctgatcagcctggtcacagctcaccaagccgtgtcctgcttgctcacgatgatcaaccatatggtattacagaacctgtcatcagtacgatggcaagcgatacggtgtcagcgacaacccattgaggtgcaagttacggtcgactcactggacgtatcgcacgctaacgtcaagcaacgattgatccctcttcaaatcccttttgagacgctgccattccgtcggagcgtgtcgaagctgagtatacctcaaccatagctgcctcgctgtaccatgcgtgaaacattcgtcagacaacgcgatgaagatcaaagtcgggcgagacttgccggtcgctgagatctgtacgaaggctgtcagcgccttccaatccggctgagcgtgtgtcatcttcggactttccgacaccgtttccgacctagatgttgtgacagcactgtcacctcttgagcgcttccgaagttgaaaacactgattgatagcctggacggccacatccagtctgaactcgacagagtctggcagcttcttcttttcgaggtcgctctcttctagacgatggatcgcgcgaagttgagacgaacggtgcttgtcaacaggtttggctgccgtgatggagatcggctggatagttaagaatcgaagtcgagcggggttgggaggagtgtaaaatatgtaggaacagttgattgcactgaacagcaacccgcagaggtcagtcgccacatgagtcggggtcgatcacatggtcttagaacatgcctgtattccctcccatctgtactttgcatgaacattttgctacctcccccttctctttcgagtcgaccgatcacgaactccaaatccctgtgaggctgttctgtcgagcggtccgaaaagggctaccgggatacgattcttgtcaatgccgggtcatcgtacttcccatcggtgacttacaacgacatccacaacgcagtacgccgctgtagataccctaagcccgatcagatgaccgctatcgaccttgacgtcgttcggccagaatatcatttgcatcgcgaaggtggacttgctcacgggcctttctcatggcgacgacatcagaattcagcgggattttgcagtctgtaacggtctttttctttctgagatgccttgagtaggtgggtatggcataggcaggctggtaccgccatatcatcagatcgagacgtcacgaaagaggtcgaaacgacgttaaagtcggttagcttcgggtgaccgaatgccggcatctgcgttcaacctcggtcatcgcgaccttcgtcagacgatcagctatcagagcggtccagcatccacctcttccgacgcctccttctttcgtaccttcaccgactccactaaattattgcatagtattttggggtgttacagaatgtagacgggtgtgtctctggtatagcggacgctgtcgacaaagatcttgatggcctcttgttgatcatgattcgaagatgatcatcattcaaggtgatcaacttgctaaagactgagcccgtcaatgtccagatctgctttccggcccggaatttaaactcgaccgaagtcagccagcagttcacatcacccaaactactgccatcccaacctttttgtctagacgatcgcaactaggctcactcttcagattgacggctctgcagcaccagtccgctgtccgctactcatacgaaagcaacatagtcgccaacatgttcttacttttcaataatggccattgccccagtcgtcagtctgttgagagactcaacccgtcacttatctcgaacaaggtgagtgtttgcttcaacattcatcacattcggctctcttgcaccagacgttttactccaatccggtatctcacaacttagctagccaggtgaaaagcttgagtaatatacccgggcatgtttgcaccaacaatggaggttatcgctacattgcaaaattctccggagagaacatggggggacatggcaaaacatgtcttctggcacttcgacgatgacaaccccccagacagaccctgtctccatcaaactcacccgtattccaagttttccctacccttgtccgagttctgcttaccctccctgaggttgctctcgatcatgacccccgagatgcccttttgaccggcctcgagctgcttgcaaatgtcatcacagacgatcggttggttcttgtagtttttcgacgagttggcgtgcgaggcgtcaatcatgagcgaggcgtaggcgtgcgtacggctcgaagcgatcttggccaggtatttctcaacatagtccgacctgtcatccgtggaggggaacacaagggtcagctttagtttgtggagtcgcactccagatcccttgttggcacgtgtgtgctcggggagggggactcacgtgtagttcggtccggtggatcctccacggaggatgatgtggacgtccttgttcccgttcgtcttgacgatagcggccatccctgcctctgtgactcccatgaaacaatgagcatgctctgccgagcccatggcgtcgatggcgaccccggctgaaccgtcggtcccgttcttgaacccgatggggaacgagacacccgatgccaactctcggtgcaattgggattcggtggttcgggctccgatggcaccccaggagataaggtccgagatgaattgaggcgagatggtatcgaggagttcggatccgacgggcatgcccattgaggtgatgtccctcatgagttctcgagcgagtcgaagacccttgttgatcttgaacgagttgtcgatatcaggatcgctggggagaaaggcatgtcagaccgacggaccaggcgatcgagctatcacaacgacgacgacgacgacgacgctacgcctcgacgactcacttgatgagacccttccatccgacggtcgtcctgggcttttcaaagtagacccgcatgatgatctcgaggtcgggccacctgccattagcgacctctcccctcaacttggtcgcgtactctctggcctgatccggatcgtggatcgagcagggtccgacgatgacgagcaatcggtcgtcttcaccgtggatgatcttggcggcggcggatcgagccttttggatggtctcgtgggattcggtaggggaggggatatcgtgacgcaagagcgcgggggggatcagagggtcgtactgcgaggtgacgacatggacagatcagcaaattggacgatcgtggtcaaaggaacctcgttcgggtcgaatggaggaggacgtggggctcaccccggcgatcctggcgtcatccattccggtggaaacttggttgttgactgcgacggccatgttgtgtttcttgtgtgcgattatattcacttcgctgtgttgttgtagcttaatatgatgaagaagtattatgttagtttcgtacaagtaggtggtgatggggtgtgactcgaaagaaagtcgggtcaatctcataaagatatccatccaagcagtttgttgaataaatgttagtttacctgatattccgtcgcaaacccgcgtcaaacacgtgatcccatcatccatcgtcgattcggtttcatgtcagagtcgggagtgatatcatttgagaagatcaggtcgagaaacccgtttcgtaatacaacgaatccctgatccacatgcgttcatcaaggttgaccaaatcgtggcgagcacagtatattccggtcgaatacacgatgtcatacatggctgaacggttatgcataaatgcacacgcgctcgtcttagcgagtacgactcattttccagacaggagcctcccgacggacgggatcgatctccctcgatacgccatcactgggacgacaaatcccaactcgaagctctcccccgagtctgacaacttcaccccgtgcgacatccagtcatcgcattcccctagatcccgaccggtcgagctccgattacaagatccccgtcgggccaaactgcgcgtgatagcactttttacaataggccgacccgtccctatcacacagcttgttcggatccaacgtcgatttacacccggtgcactgaggaagggtccaggtgggggtggggggaagacggtcagccacgggcggatcaaccgggatggacgtttgtgatcgtcctgatctgtcaaatctcaccttgagacaccatttatgccatttcctactcagtgcgtttacctaggagagagggccgacaacgggacgatcaggacaaaaagatcggggcgatacgtcgtgcctgccacgatctctattttttgagaatccggaggggatcgcaggttttatcggaccgacatcactcacagcttccatgaggtagactttcttcccacatgccggacagatatcacctgctgctgaagggctggatgcgaacccagctctgactaccgaggctgagacaggggtaccgtacgtcctcgccggcatcgatgtcgatgccgtcatcggtgtcctgctctcatcaggcttgaccggcgtgcccatattcgtggaagacgatgccgaggtccccccgaacaagttgctcggtttcggcttgacagtaggtggggtcctcgatatcgggttggtacccgaccctgacgctgtttccggggacatcgtcgtcgaggggtccgcccgggatacgatccggaacggcatgtactgcgtgtccaacccctgaccggcaccgacggcttcgtcgaccgaccgatagatgtcactatttgaagatgattggtccttagactgacgatctggtatggatgcgagttctgaagctgggttggatgagcgagagggacgtgagggggtagagggtgctgatcctgatcccggtcctcgtgatggtcccgccgaaggtgaaccggtgtacacattggccgatctcaaatctgtccagtcaacgaccatatgccatgaatatgaaatcccagccgcttggtctcgtggtctcgaatcttcgactcgcctcgtggggaaaacaacatccggtgacagttcctgcaatacgccttgccctcgtgttcctgcaaagcgcccgggtcgaccctggtcttacagctagaacagatcaagcagggtttatggtacatgttcctacccggtcccatgatctgttcggcatggtagactgggcgggagcaggtagggcaaatgggtgtgccgttcatggtggagttgtttggtagatcgagtcggtcccggcttgggtgatgctatgccgtatgtcgagtgactttccgggccactggattcggataatacactaggtagctgtcaagcggctggaaggctgtgacggtgatgatgctgcatcgtggggcagtctgtatacactactgtatctcatcgtgttccccttgttctatccatgccccccccccccttgcacaatggtatacatgtgttttcacgtgattctatgactttcgtcatctctcgactttgtcaacatgctcgctttgtgtgcttctgtagatcaaacccagtgtcctattcatcacgcccatcaatcccatctctcgatcggaggttccacaccgagtcccaatccaaagatcctggcgggtggccatgccatgtcggtcactcagacgctacgctacgcgagtacgaccatcctcaccgactcgccgaccgggacgggtgggaaccagaaagatggagacgacgttcgggacccgttgaccaacccggccacatcgaggatcgtcaaggtcactatcgcctgcgctatcgtcgtactcggaatcacgggtctcatcacagggttcaaagtgagcgtttcatccgatgtcgatccaagtcgtttccccccgcaagacgctcatgtctcatccgacccttgctttcgactctgttgtagatcgccggcctgtaccgatctcatcgggagactcgtcgtcgtcgtgcgatccaagcgaccatcgctacagggggtcaggtccctggatggatgacacaagaaaccaagaaaaagtggggaggaagaaaggtcaagaatgcgcacaagcaggtcgagtgggaggggatcgccgcgtgagcttcctgttcgcgggaggtcggtcggtttggaacttgcgcaaaaggcgggttccatttttagatttcgggggatgtatgtcacatcgcaagagctgtgtatcgttgttgttccaagacgccgaaaactggccatcttgggtttagcccatcatgcttgttgtatcgaccgagtcatctaccatcatgtatcaacgtattttgctgaagagcgcgacaccgcaacgatcgccgaagtaaagacgacgagctagataaacgtcctcgtctattcctgccacacctcccggatcgatcatatgaccgaccgtccaccgaagcccggaattcacaaaccttgtgagcttattcactgaggaggaatgagataaaccggcgatgcccatctgcgtacactgcgattatcccgcggcggcggtttataccgtatatcaatccgtcaggaatactcggctcgaagtgtgcgtgagtcgcttccccccaacccccaatgattcgcatctatcgggttactcgagtggggccgggtagtcatctaaccagttccctcggactttttgctcttgtcgataaccttggctcgacctcgaccaccggacccgccccgcatcgactctcagtcccgatgttcacgcttcaccgaccccctgatcgaacacccactcgtcctcatcctgctcgacctcgtcctccttaaaccgagggtattcaggcatcttgtctttaatcgggattccccgccgaggagagcaggaagggacgggaatctggaggtggagggagatgtggattcgcacgcagcggtcgatcggggcaaggcgagtcgtccgtcgaaaacgtctgattgcgaaacgaggcgatcgattgaccggatgaagacgtcgttttgtcgtcccggtcacgtgcaggtcatttgggatcatatcttcaaactcggactgatcgtcactctggtcgagtctagcaagtctgctgcacaaatcgtcaatcggacgttcggaggcattgcagctgatggtcgcttctcatccccatagtggtactttatcgacaaagctatgtacctggagatttagcggctgcttccagtacgggaacgctcgtgaatttggataattggcgaggggaaatgggcaagctgttcatggtcgtcctggtgaccctgctaggtgagctcaaggccatacgagctcgggctgatacgagtccctgggaaagccagaaggatcaacgaatttgattcgtttccgcttttcaatttgccatttgtggctataggcaacgtcgggcagcatctgacaacgacttgggtctcatggggtttcttgcgttggatggggtggttacaggatggacgtcaagtcacatccgaggtcaagctttgggaaaaacaggtcgccagaggaagcgaatgggccaaggacggtcggagaagggatttcaggcaagtctttacggcaagatcattggcattgatataaacctcacggttgaatttatcaacgttgaaaacagactccccatgatctccctaacgttgctttacgcttcagtcctcccgctttgtctacacctcgtcctcctcgtttggccgccgatcgtgacgacgcacgagacggcgacagacccctttctctacttgcctgtcatgtcactaccgcatccttcctggctggacccactcgttgccacgttgcagagggaaaaggttgacgaaatgtggatctcgacgcacttgttgagcgggatgagcagtgggttggcgttgagggtcttgctcccgacgcgaccttgggcgacgatggtggccgtcctaggcgggtggatggtcaaggctggactacatgccgtgcttgtaaacgtgacaagtgtgttagagtagtagtagttaagtgtggtaggtagtgaataggacaagttggctagtttcgaatcgtcacgtgactttgtttcacgattcgagtcaacctcgttcgttcgcgccgatcgacgtcacaacggttcgacataggaaaatcgcaaagtgtaacgaaatggacacagttcacgatttccaaagaaacaagatcattctcctcgaccactctcgtattacccaaaagcttgaaaagcaatcacatatagctcactcaccatggtattcccggcgatgctgccaaaagtagactccgagtcgatcgacacctcgatcctcgatgcgctcgctcggataggacccatcttggtccacacatcgaccatccgatccatcgcttccaagctcgaccacgctcaagagatcgaatggttcgtcgagtgcgattccgaagaacaagctcgggaagctttggaacacggcgccaacaaggtcgtgctcgatcacaaggccggcggatcgatcggggaggaatacaaaaaggacgtcgttctgaggatcgactcgaccgatattgagggttccgctatcgaggggttcgcaggggtcattctcgacaaagaggcggaatcgtcacagatcaaggatatccgcaaggcgttgaccgctcctggtctcatctttgccgtcgaagccagctcggcctcctccacctcggacgtcgtgcccatcgtcccggtgtcctcgctcgacctggaaaagatcgcttcgacctttgtctctggcctcatcactgaccgccccgacggtttctacccgaccatcgtatcctcttccgcctcggtgcctgccaagctcgcgctcggtcttgtctattcttcccaggaatccatcaaggaatccatcacgaccggccgtggggtctaccaatcacgccgtcacggactctggcgcaagggggagacttctgggtcgacccagagggtggtcaggattaggagggactgtgacaaggacgccttgttgttcgaggtcgaacagacgggtaccgggttctgtcacctcgagaccgagggctgcttctcgtacgaatcgagcgattctcagcgggatgaaaagaagggtctcgtcgcactagaagagacgcttcgttcccgactcgccaacgcccccgagggttcgtacacggccagaattttcaacgatcccaagctcttgcgtcaaaagatcatggaagaggccgaagagctcatcgaggcagagacggcggaacaggtcgcgttcgagatggccgacttgatgtactttgccatggcccgatgcgtcaaggccggggtctcgctcgccgacgtcgagaggaatttggacgaaaaggccaacaagggcaagcaaggtatcaggaggcaaggggacgccaagaaaaagtgggtcgactacactgacaagaaggaacaggcccaggtcgtcctcggcgaacagacggttgaaaaggtggaaaagacggtcgatgtgcccaaggaacaggccgtcaaggcggaatccaagcccgaagcacccgtgcccaaagctttccctacgagccaggacgccgggtcgaacgagatgatcagaatgagaacctcggacctcggtcaagtctcggcttcggagcgcgccgctttgctgcagcgacccgtcatggactcttcggccatgatcgagcgggtcaaacccatcgtctccaaggtccgagagggtggggacgaggcgttgaaggcgttgacgaagcagtttgacaagtcggatcttgagtccaacgtcctccttccccccttctacccccctccctcgggcaaggaactctcgagcgagatcatccacgccatcgaacaagcctattcgaacgtcaaggcgttccacttgggacaggcggaaaaggaacccttggttgtagaaaccatgccaggtgtcgtgtgcacccgattcgcccgacctatcgatagggttggaatctacgtgcccggggggaccgccatcctgccctcgaccgcgctcatgctcggtgtccccgcacaggtcgctgggtgcacgaccattgttctggcgaccccgccccgaccggacgggtcgatctcacccgaggtcttgtacgtagccaaactcgtcggtgtcgacgtcatcctcaaggcgggtggtgctcaagcggtggccgccatggcttacgggaccgagacttgccccaaggtcgacaaaatctttggaccgggtaatcaatgggtcaccgcggcaaagatgttggttcagaacgatacccaggcgttggtcggaatcgacatgcccgctgggccctccgaggtcatggtgagtcgctcgcatgggcaagcttcgacgcaaggtccccggtaggtttctcgactgaccattgtcgaatcgttattccaggtcattgccgacaagacggcgaacccggtatttgttgcttctgatctgctctcacaagccgagcacgggatcgactctcaggtcgttcttgtcgcgatcgacctggagcctaaactgctcgaagagatcgagcaagaggtcgaccgacaagccaacgcgctgccccgagtcgatatcatcaggcaggccatcaagaagagtctgatcgtcaaggtcaacgacatcgaagaggctttccgattctccaacgagtacgctcccgaacacttgatcttgcacctcgaaaagtcgagcgacagcgtcaagcttgtgaacaatgccggtagcgtttttgtcggtgcattttcgcccgaaaggtgagtggcaggacgtggcggtgcgcggtcatatcgtatggctaacgctcatccccatccttgcagctgcggagactacgcttcgggtaccaaccacaccttgcccacgtacggatacgccaagcagttcagcggtgtcaacacactatccttccagaagcacatcacctcgcaagaactgaccgaggacggtctgcgaagactcggacccatcgtcgttacccttgccgagtgtgaggggctagaggcgcacgccaacgctgtgcgcgtccgactcgccaccttgcagtgaacgcagtcaaaagtcagtcgtgattgtaatcaaccaatgagaccaatatgaaagcagcatagagagagagagggagagattcgtttctttcatctgttgttgattgtgaaccctctttccttcatctgattgattgccatcaaaatctggggtcgatctcgttccgaacggatgtgagttggtgcaagaatcctccaaaatgaaccatactggcgcaccagatgctcgatcacacagtcttccaggtcgcgtgccgctgtaaccctcccttaaagacactttaccctgatgagaaagttccctacagagacatacaatcggagcacgagggttgcgacattcaatagggacatcctccttcccatcatgtggtgacctggaaagacagacagcggctgaccttgtgccgttttctgcaaacaaggtacctaccaggcacttcccagactagcgatcttagcctgacaccactagcacaccgaccctcctgaaccggacagacttgaaatacctgcagccgatggacatgacgttgacatcgaaagggtggttcacattatgtcatgctgcgtgtcggtccacgagcgccgaaacgggatatacaactagattatcaaaatacactgaatggcttggtcgattcgccatgggccggccatctattacccattgacccgttggatgaaggccgtcatcttgcctgaatcgagaagcgcgccatcgctatccattgctttcgtcaattcgtccagcaatttctagcaggacgggatcgaagaatagagtcagagaatgtcaatcggccctacacacgctagctgcactcacttcgtcgaccttgtcgaccggcagcttgacacaagtcgcaatcactttacgatacttggccgtcttttctgccgacgtggctgcgacatcgagcaacttctgatcgagtagaccctctgttcggcgttgccatgttcgtatccgtcgaagctggacaagggtcgatccactcgagcggtccacgattgggtcgacgacagcatcgtgggcgagcaagtccatctgcccagggtaccattcgaaggcggcttcgagcgggaggaccttttccaaatcgtgagattgttgctgcacggcctcgacctctttgacgaggttttgtgcagccgtgatctttcttcgttcctcggcgagctcgcgggtgaccaatacgacctgggcgtgaatctggtccaggttgctctgctttgaccctatctcttgacggaagtcgttgttcaactgttggatcatgttggatagtcctgaagggcaaagtttggaagggtctctcgtcagtcggcccaccaagcaggagcatgatgctcgaaataacatacgtttcaaaaggtcgctacccttggtgtacgggacctgggaaaatacgtcggccgccgggatcgctccatatccgtttgcagcttctaggccctacgaggacgaggttcgacgtgttagccggctgacacaaggatgatccacggcatcgagctagacttaccggtacttcgagaccatagtcgaccggtctcagaccgatcttgttcgccctggaggcgtcggcacccgcatcgagcaacaactttaccaaattcttgttgccgaccctggcggcgacgttgagcgccgtgtcgccttgcatatcccgaaggttgacgagcgccttgagcaaaccttcctcctcattacctgcgatccactcgagcagcgtcgacatgtaatagttggccgacgtcgctcgtcccttgatcccggccacgagggcgacgtggtgcaagacggatcgatgggcgttgtcgatcgtcttgatcgaagaacccaagtaatggtcgagcaaggtggacaggttgttgcggtccgcgttattggtcgtcaggatggcccggatcaaaggggtctctcccgcaaagtttccacgatgcacatcggcaccccgttgaatcaactgtgcaatgatgctgtccctcgccaacgctgccgcccaatgcaaagcggtatgaccccgatcatcgatcacctggtcgatatcgatcagagtctcgccgtttttaccctcatcgtcctcgttctcatcgtcctcgttctcgtcgtccactaccaacaagtctcccgtttcttcgccgtcagctccagctgtaggtttacgaggcgagagggccaacaaggcgtccaggtcgacctcggtcgtctccttggcttcaaagatggccaacaactttgtccgtgcccgggaggatgacgaggtcgcgtgcgcgccagagtccattgacggcgagtctggctcgacatccgagtggcctggtcgatctggtcgattcgctagtcgcatgcccgggggtaccgacccatccgtcaatacatccatggtcatcccgtctccttctgagaacccaaatcctccaggttgatcctgtttcgatcgcttcaacggtggttgctgcccagcatccccttccaccatgtaggatctaccgtactggtccacgtacagacccggtgtgctggcattctcgaatccctcgtcccccgtgcctaggggacgtttcaagccgcctcgctgaggaacataccctgcgcctcccgcttgctgttggacggacgcattcggagcgtaataccctcccggagcgatggatggctgacccgattgacccatctgtacgtggttcgagtatagcatcccatcgccccgatgagatggatcgtacgccggatgatgaggtccaccgggtgccatcggaccagcccctggtgcgtaatgtcgggccatagaactggtccccacgtcaaacgagccggaccctccgggtgtgcgtctggattgaggatccgcggtcaagagacccgggacgggcccacccgtcgagggtcccgacgctgcaaccgcggagggttgacttcccaggatcatgttcataccgccggccaacgatctcccttgaccaggagcaggtgcgggggagatgggtgcacccgggttgaggttggttgtgttattcgtgcccgccgagtaggctgcagggctgggtacaggaaggctcggcgtcgagagtggtaattgagcggcatgggcctgtaaggagaagacaggttccagaagcccgaggacaccaaagctacgcgcgaggtctgtgatgcgggtcagataggggtcgaatttcaggtcagaggtgtttcgaccggacgaatggcgtaaatagactgggacttaccgacaccggtctggtaaggtaccctgcgaattagtgggagagatcacgatgctcagcgcgggccatcccgatggtactcgttccgctgaagcttgctcaccatgtcccctggtactttccatatccaccttgaatcttctgatgcgttccctttgagatctccctgtccaggtatttcgtccgcgccgtcttgttcaccccggcaaccttgaggatctgagtagcattcaaccacctagagaatcgttcgaagaaaagatccagacgaagttgaagtatcagcccgtcgagcccaggtcatgactgttatagttgcaggacttgcatgtctgaacgtcgcatcatgacggcaacgttcctgaccatcgcttcgaacacggggatctatgggacgcaagccgacgaagttcatgcgttagtaccgagcaatctatctactgtccactcgagattcaagagccgacgtacatcggaataggcggtagcgtagacggtcgcatgagtggccgtcgtgggctcgccaggatatccgccggttcctgccgtcgcggcatgggtgtttgaatccatcggtgggtggtagtcggggcaagacgtagacccgttcgaaaagagcgatcgatttctaggtgtatagcgaggcgggtgtgactatcttgaacaggttctctacactacactttaccgttgtgactctggttggatcgaatcagatcaaacgatcccatgacagcgagcgcgtctctctctctctctttctctgttcgctacctctgacagaagtgccgacgcgtatcgacgcgttcgaaatggggcaaacacacacacggacatcacatcatcatcatctatatctctcgagtggccatgtccgctttacgtcacaggccttaaccatttggatcaaattggtgccttcgacaaaaatccgagtctttcatctcaacagctaggatcgttcaaagaccaacatgtggtgaatggtacatcctggatgatcctcagctgatttcctgtgcgatacctccggcaaatggggggaaaacatgggaaacgtccccccgtgcgaacttgtgtttcacgcacgcaacgtcgtagcaaaagagatagtcctgcaacctggaagacttgtggcgatctataggcatatgagatctttatcgctgatttgtaacgagattagctagatacttcgaagattctgtcggcacgttacggcggtcacgaccaagatttgtccttgcggtatgttttaccacatcatgcatcgactcggaatcttgtccggttccagatcatcaagcctctagtgtcgctatcacatcagaaagtgcacatgtcttgggctttcggtggacatggacaatgtgaatcgcgaatgggttcgtcaaatcgatagatgcatacccagccagctgtacgacggcccgctggtgactctgggtcggaagcgttgacatgatggacactcgggaaccctgatcctttagatacacttagattgaaaaagattctcctgcctgtgagacgaatattgcgactggtacagcttgatccagttcccttgtgtacctgcttcggtagctcatttggccattcgagcaacaatcggtcgtcgcccatccgggacacatccccgacgcaacattccaacgatacccatgctgacaagaatggcatgacaggcatagactatcactgtcctgtgtacactctagagtattgcgaggggcacgtcgcttccgctcacttgctgctgctgctgcgtacagcctacgccatcgctcgacacgtctgaaacccgaaagtgacgaattcattctccgtcggctcccgcagcaacagcatccttttggctactgggtgccgaagagtggatcgttcgtggaccttctggcattctggcaatgtcgacgtggaaggacggaaggggaatcgacccgtcaacaatgacccacctggcagcgaggccagcgagggggtcgagtaagtgtgacgtcaggtgacatcatatgctaccgctctaaccgggcgaaggcggatgaggcagggcccagggtggattgcccgcgtgttgttgattcatgctctatccgcgctatctcggaaccaacgttcagagacgagtatataaccctgtccccccttgctggtcgtccatcattgtcacttgccactcgccctctcctcttctactcaataaacgctcatcgcacctcttagcactttaccccaaaccaaaccaccaacacaaactctttaccacaatgtctgacatgggtcgtcaatctctcggtaagtacacctcgatgtgcgcgttgatcatcgcgtcgaccctcgagcacctcgaagatgatatcctgacctgttcctcttcgctgcctcttcaggtgacaaggccgcctccgccgtcaagcccgactcggagaagacctacggtatgtgtcctagtattcttcggttctcctgttgttctgcaaactgaccttggatttacgtcgccgtcctacagttgagcaggccaccgactacgtcaagggaaccctcgactcggtcgcctctgccgtccagccccagcaggagaagaggtgagccattagactactacctcagcttctcaatctttgctaacgtttgacgttcaccacacagcaccacccagaagatcggtgacgccgtctctggtgacaacaccaaccgaaagctcgcttaagcgggtctcggtcctcctacctcttcactctgaagaaccctttaccagtcctccttcccggggttctggtcttggatgattctgaacgatcaagttgtacgaaagttacacaaacggaaacatacatatgaattgaagcattgcggtttaatttggtgaaagcccaccgtcctgtatgtcaatggctccatgccacgcgcagcgtcatcactccgttgtcgtccattccgctaaggattaggcagcggctctgcagtccgcttgctttgactgtgtcgtgcccatcctcgtcgttccggcctcttgagcgatccaaagagcatgatcaataatcatgttggcgcaaagccgctctgcctacatgcagcatgctgcaacaaactgaacgtgctatagcgagaggtccatgcctaggttcaggactggtaacagcgattgtacatgtggcttgtgagaatcaatatcgtagtttacaacaggcacacgatgtggagtaatatcgtcgtatctatagtgtgtcgtttccggtcgtcgagggtcctgaagagaagggacagtctgccgttagctaacacatttcagtatctcttgcgactgcagtcgaactcacgttacttgaacagctgcttaaccgcccgctgcaagtcgagcaaggcatacttgggcgcgagatcggcgggaacgatctggtccgactgtccgagagcgtcaatcaaggacgacttgtagagcgagtacacgatctccctgtaagcgctatcgggcacggtttccgactgatcgattgtcagctcggtatactcgttgagccacatagccgaggtagctgcgtccatggctacaaaggcctccaagctgataaagcgaggaccagcttcttgcgacgtccagctctcaaccgtctgttcggcgatgagagttgacgcccatttggctccttccgagctcgtcggattttgagcgactttgcccaggcggtagtagaccttgctgtcgttccaacccgcagcgaatcgtttatacctctcttcagaggccttgtaggatgcgccaaagggtgataaagcctccacgtccttgtctttatcggccttcttcatatgcacaatgtgagtggcaatattggcgatctgcgagtgcaactcgaaacctcccaggtcgaggggccagaggtacatggcattgggaacatcctggtcgccagacgattgccgaccagggaaggctcgagagagctcatcctgcagccaggtcagaatgttgcttcctccggtcaacctggcctgaacctctccaagaacctgctgcacatgttcaaggtgctcggatccattggctcgcaagggcagtgcggtgttcctcacaatgaacgcctggtacttgttccaaacgttgattcggcctaggaacgacttggcagagcgcatttcctgctcggcctcaatcagacgggtctcgagcagcttcatgtccaccttccaacttccatctgcctggagcaagaggtatccccatcggaagggagcctgcggaaggctttgcgggacctcgagcttgatgccattagcaccgacaacgcgacaaccgcccttgtcctcgttccactgcaaatgggtgagatttgcgaaattcaccatgacctgatgggcgccgacgacctgctcttgatcttgcgaccaaaaccaaaagtcgtcgtgattgcggtggacgtgcaatttcgtctttgaagcaatggccatgtccaagatgaccaacaacagttcattcatcagggaagaaatccccaagccgaacggagtgccccgctggctggtgaccacgctgccgtctttgcaacgcacccggactcccaggtaggttcgcaaccatgcgacccaagcgtcaggagcaccaaaaaacttgaagaccgacaggggcaccgaatgatccaagctcggcccaaagtctttgatatcaaggtgtaccgcggtgatctcggctttggggtcgatcttctgtagcaatcggatatcggtacagagcatcttgaacacatgcgaatatgctcgtgcggtcttgccagccagagcagccgagtgccatcccgcagcatcaaggtcggcagatgtctcgcttgcagaaccgtccttcttcttcatattcttcttctttctctggacaccgtcgccgtcgccgtaccccccaccctcgtacccgcctagaccggcagaaacgacctggagcatctcttcttcctgtcgatccaaaaacgtcgccttgagtccggcgcgcttgacctcgctgtcaaaggatgtcgaatccgcttttgtccaatcctgcgtggccatcttgtacttgagcaggtcttctctcgagaacttggtgacggcgctatcgaccacggtgctcatgggccaacattggctggtgcgcatctgaacgagatgaagctggaaatgatttgtccatcggaccgagatgacctcgagatatatcgccaagttgacgtccaagtcgagatgctgacgttccttgccgttgaggtgtttctggagctcgatttggaccccttcctctggccagtcccactcgtcgaagtgtctcaaagtcgaggtgaatgccgacgccagctcgtccaaggccattggcttggagctctcttctttgagctgctcgcggacttcggcagtcctccaacgtgggtccgccgccatggtcctcatggccgtcaacacctcgtccggctcgaccttggccgtgagcgtcttttccccaaacgtccgtgtgagccgctgaacccgctcaagctcagtaagtagctcggtggatgctccttgatcctgaagaaagctttgcaagtcagccacttgaacgccggcccatcctgcttcgccttcggccttgccttccaaaggaggactgaaagggacctctgacgattccgtcgacttggctccatcggtctctagccattgttggagtacgtcgcagaacaagacggcaagatcagactgtgtggaagcttttgataaaccctcgctcagctttcggctggtctcggcagattgagcagtatccagcgacggatcgaatcgggcgatcgataggaacgcctcgccatccttgagcaattgcttctgtgcggcttgacggtaggacgccgagatcttactcaaacactcctcttgcagaacaagaagcttgaaccagtcctccttgcttcgtgcatccaagctgggaagctgtagcgacgacatgtcgcggtccaggttctccaacgccgaccggactttggactgttgagctcgtaacaccgaaagcttatgcgcggtggtgaaacgagctatcccagtactgacatgaccgctcatcctgacaagatgccagccagtaagtttgatgttcaaggtaaaggatagtggggcgagaggccagaggtaaaagaggcccactcctcgcctcgccccgctatatatcatcaaatcatatcatgttgtcagcgcgcgtcatgtgattcacaatgaccggttcaacgaacggagctaaaaggaaggttacccaatgtcggcgaattatcaaaggagagacctcgtggaccggaccgaaagcaaagtccagcagcatctatagctagacgtatcaaacatgtttcattacatcgtcaggctatcgtttccctcgccgaggcaaacagacgaccatcctttttccagtcgctctttctttttgggacgatcgttacagtgtagtagtagtagtagtagtagtagtattttgcttcattctcccgagcctttcagccaatgctcatgccttgtcccgcttgttctggctgacgataccggttcgtcctcccatcaactcgacgagctccttcatgtccttccaccaggtgctttgacctcgcctgttcttgatatcagcggcggcgagcatctcgtcgatcggggtaaagatgatctgactgccctgaatggtgatcgaggcggccgagtcgatcgtgttgcaaggctggcgacggccagagggcttgccggtgccagacgaaggagccttgtgagcctggctctccaagaactgcatgcatcggagcgacagtcgcgcggctcgggtacggtcgtaaggcgagggcacacctccctgcagagtgtgaccgagcgaagcggatcgcgagtcgaaaatgttcttgccctcttcggcaaagatcttggtcatgacctcggtcgtgtaaatcttggaagacttttcgctcctacaacacggcgaggcacaggggtgggttagctcgataaagtttgacgttgcatcccggactgctggtcgactcgcctgatgaccaatcgaccctcgctcttgccgggaacgtcgagtgcgtaacgcttcttcaaaaagtcgacatcctcttgcagaacatcgaggttgattccgctctcgggcgtgtaacagagaacagcaccgacctgagaatcgatcagggtcagctgatggtcgtgggtcgacgcgggacgcccggaagactcacggccatggcacccatggtggcaatgtaacccgacatgcctccctgggtctcgacgataaagacacggttcctgctggcggaagcgctctgcctgatggcgtcggcagcggcgaccaaggcgttgagactggtatcgcttccgagcgagtgctcggtgaggggtacgttgttggacaaggtggcgggcaagtggaccatggggatctggaagctggggtagtgcttcctcgcgccttcgagcatctccaaggcgagcaaagcctcgaaaccgccgaccatcaacaaggcgtcaaacgagtgagcctggaagctagcggcgataccaccgagatcgacgtcgggcagggtacggttggtaccgagctcggatcctcctcgagtggtccagttgtcgactcgcaaccaggacagctcctggacggcgtcgtcgagcagaccgttgaatccgttctgaataccgataggggtgtggcctcgggcgagacagtatcgaacggcttgacgggtcgcggcgttcattccaccggcaggagcaccgacgctgcagaggcagaagttgacgaggtgatgagcagcagtcctgtcgaggtgagtctacggagaatgacatactggatgataccgattcggagtcgctgcaggtatccgagtgagcggtcgttagctatcgggtcacgccctcgacacgccatcccctggactgaccttttcgacgggcagagtgaggctgtcgtccaaggtcgagctggccttgaaagcttgcaacgactctgcaaactcggggtcacggaacgacatggccttgtcaaagttcttttcctcgatggcgacggcgacggcttgggtctggcaaggggtacgatgggtaagcccaggtcatcacgcaaatgccgacgctcgttcgaacctacctgagcgacggcttcgaggaggggcttcctggtgatcttgttctcgctaattccgatcatgaacgaaggggtgtccggggtagcagagagcaaagcctcgaccgcctcgactccttgcaaggtggcctaggggagcgcaaagtcgatcagcagcgtatcgcttctgggcgagggcgctctcgttgggcaactcacgagaatccggtcataagcacagggggctccacctcgctgggtgtgtccgagggtggtgacccgagtatccaagccaagcctgtcgacgaggacgtccttgatgtattcacccttgatcgcgttgaggttcttgtcgagagcgccctcggcgacgatgacgatcgactttctctttccgacttgacggtgctgcggcgggtcgggaacgtcgtcagatcgtagcacaagcacgaccgggaggagtcggtctggactcaccgccttgaggacggaacacatctcgtcctcccaattgtcactcttggggggttgctcgggaataaagatgtagtcggcgccggtactgcgaggtgacattggcgttcgcagtcagcatcgacaagcccggcgatcctatgcccgccccgaaactcacgcgataccggccaacaaggcgagccaaccgcaatgtcttcccatgacctcgacgacaaaggctcgcgagtgggaactggcggtggacgagatcgaatcgacggcctcgcagatcctgtgcagagcggtcaatccaccgatggtcaaatcggtcatggccatgtcgttgctgtgaacgccgcagagatttcaaagtgccgtctgtcagcacaccgcgtcgtatttgcaaccccagcgcgtccctgcgatccaaacacccactcgatggatccgacgagcccgacaatgttgagatgggcaaacgtctctgcctggactttggtgatgcggttattctcgagcaactcgccgacgagcgaaggccattccttgcgcaacatgtcggctccggtcaacgaaccgtctccaccgcagacggcgaggcagtcgatcccaaagtggatcaagttggcggcggccttgagtcgaccctcgcgagtacggactgggggaggggagggggcgtatcagtgagacggtcactcggcgtacggaacgggaaccccatgatcctcacatgaagggcatcgggacgatccgatcaacgtgcctccctgcgatcccccaacacctcgctcgtcagtccctatgtggtcacgggcgggggggggggggggggcatcacactcacaccccgcattcctcccaccctcactgacatccatcgaccatgcgtttcacttccattctccgtcaagcttcccgtgcggacactctggcgttcatcggcgttggtcagtcccgtcgctgtctcctcccccaggtacctcccgctgatcgctgacccggtctcaccccgccttgatcacacccgccgaacgaactctacctcgaattaccacccgctgttgtcgctgccgccgctctcgtcgcaggccggatgggtaaccacatggtcaacaacatcctcctcgcctcgctctcctctcccaaccaccctcagatgggcggtgaatccacccctgactggctccacatgaaatcctccagcgggaaaccccgtcgaatcttgatctgtgatccgttcaaggagaacgtcgacctcactttgaagcgcatgaaagaggtcttggggagcagcgatcaggtcgaagtcggcgtcgtcgagagtgggtcctgacgttcatgtcgtgcggtccgtgtccctcgtgtccactttgagttgaccacgaacggtcgaccgtcggtcaacgccgtatttagatccatacgaggccgcactctccgcgtcgaccctcgtcagcatgatccctacgcacacgcacgtccaatcggtgtataccaaacaatccagcggcgacggctcatcgaccgtgttgtcggctttacaatccggtaaactcgaccgggccgagatcgagcgtacgttgtgtatcgagcagagtacgatcaggatggatgtcagtcaggaggtgggtagggagatcgagggggccggggcgagttgggtggatgcgcccgtcagtggaggtgagtcggctgtagtgaaggtaagggtcggggatgtcaagggcgatgagggctgacctcgtatttctttcaacgatctcggaatcctctgtgcccatcgacacttcgctccgacgacgatgccgggacccaggggtgaacggcgccgagaacgcttcgttgacgatcatgtgcggcgcatcatcctcgtcgacgtttgaccgggctaaacccgtactcgggatgatgggtaaaaaggtcatcatgtgtggcgggttgggtatgggtctggccgccaagctttgcaacaagtgagtgtggccgagtcggggcgcgtggtttctgcagaggttttcacgctcggtgttcgtgagctgatcgactgtcacctcctgtccgtcccatctccctcgccctctgtcgctctatcatgcttctttttccgacccgacgcaacgcttgcactcgtcagcatgcaactcgggatcagcatgctcggcttatccgaagccatgctcatgggcaagaaactcgggctcgattcagaattgttgggtaacattatcaacacgtctacggggcaatgttgggctagttcggtgagtgtcgtttggttgtaggctctccccccgtttggatgcggtggcgaggagtccgggtggggcggtcggcgtagaggcgcgaagatgatcatgcagagagagagagagagagatgctgatcgatgtcgaccttttttcctcccttcccattcaactcttcatcctcgccggactctccacactcgccgaactctatacatgctcaccggactctccgacgtcgccctcactatcgctcggtgctcggtatggtcgcagatcaacttccccgtccccggcgtccacttgcccacggtggccaaagcgccccccgcgtcgcgcgagtaccaaggaggtttcgtgacggcgctcgcgcataaagacctcgacttggcggtcgaagccgcccgtgtcgtcgacagtcctcttttcgtgggcaagttggccgaagagattttccgcaaggtcaggggtaccgaggattgggatgctagggatttcagtatcgtgtacaagtggttggaggagaagagcgcgtcgtcgtagtcggcgtcggcgtcgtcgtcttgagccacgcggtgtggtggtctgtgtcaaaggaaaagaagagaacagaaaagaatcggtgcgattgtatagtcatgagcaagtccatgaatctcggcagaaacatgaggttgtagctggatccgtacaagtgacatgagagatagaagtgtgtttatgaggttcgtgtccttggacttttcgtcgaccgaggttgtcattggtgacgcatattcatctaaacacacccatgttcatcacccattgcatgcatttgaacaacaccatcgatctgtacctgctattcggcgccgacaaatcacctgcacaacgactaaagatggtaagatcgtcatctcccttatcacgcttcctgacgtaacgccgttgacctctgtcttcgtaggccaccgcaaccaagaccgacagctcgagccatcatgtcgtcgatacagcgcacgaggacatgatcgtcagtacccccgtccttcctcgtcccgctccaccccacccgagctgattcttatcctatcaaaccatctgatccgtctctttcctcacgacaactcgttgatcccgacctcgtcatctaaacgaacccactcggcacatactcgcactcgcttaccctcctcctcgcccattcatccgcaacctctttgcctgtggccttgcaccttctcgataccggaatctcctcacctaattctccctctcccatcccatcaattcccgtccgttcactctacgcatcgcatgccgtgaatcgtatacaatggggacctgtacagcacgatgcccagctcgactattacggtaaacgtctagccacgtgttcgagcgatcggacgatcaggattttcgaggttgtcgatgggaagcctgttggagaaggggtcgtgctcaaggggtcagtcaacgggaaagacgcaaaggatgggtatggagggacgactgattgtttgctcttttcctccacgtctacctggtgatccggcgactcgaccgcgactgctctgacgactcgcattccctcgactcgcaccatgaccgcacacacacacacatgcacacaccttcgtggctttcccctatcgtcctctccttgacccgcacgcatgcccggctgctgcaatcgtgcaggcacaccgctcccatctggcaaatatcctgggcccacccttcattcggctcgatcctcgcttcctgttcatacgactctcgcgtgtacgtgtggaaagagacttcttcgtccagtgggaacgttggaggtaatggtggaacttttggtaacgcggggacgggcaaggggggaagggtgggcgagtgggaaaagatcaaagaggtcgttgcgcatagtgcgagcggtgagtctcgtttcgtttcgtttcgtcgttgcgtgaggtcttgggccttcctacatgcaggaatctaggcagtcaggcttattgctgtgacatactcggtgtttccgtcgttgtcgtcgtcatcatcatcccacagctctgctgaccgagaaactctcttcttgaaaccctacagtcaactcgatctcgtgggctccttacgagctcggtccgatcttggcttgtgcgtcgagcgatggaaagatctcggtcttgaagttcaacagtgagtctatcgagtcctctctcaccgcccctcgttcaccccgcatcacgttgttcctccgaatcacccacgtcgacccacccacatccacctattgatgaccatcgagactccaacccgagtctgatgtcgacgctgacgctcttcgactcgcacgaccacagacgacggttcttcggacattgataccttcccggcccatgccatcggggtcaacgccatctcctggtcccccgccatgtcacccggcagcttgaccggatcgggtcaccaacaacctcaatcgcaacagcctggacagtcgggtggtcaacagcagcaacagcagagcggagcgggggagacgggttaccagaaaaagtttgccagcgcgggttgtgatggcgtggtcaggatctggaattacaagtgagtccccccttcaccttcgctcgagtccattgtttttgctctcggactgacaagctacgtctcgtcgtgtacgtcgatatgatagggaccccaacgcaagtcccgagatcgagacgaccttgaatgcgcatgccgattgggtcagggacgtcgcgtgggcgcccaatatcgggctccccggtgaatacatcgctacgtgtggacaagtgagtctcccagcgtgccgcaatcgtgtcccagcctggtctcgccggactgatgggatatccgactcttccacgcaggaccgaaccgtccagatccacttccgaccttccccgacctcggcctggacctcgaccaaactcctccctcatgggaacgacaacccggaccctctcttccctgatgccgtgtggagggtctcgtggagtctcgccgggaacgtcttggcggtcgcttgtgccgatggcaaggtgacgctttggaaagaggtcatcgggggcaaggggtgggaatgcgtcaacgagatgagcgggtagagaggtgctcgcaaagtagggacgtttgtattggaataagaacatcaaccgtgtctgttttttacgaggccgtgcggcggcatcggtaggggcggtcaggtcacctcacgcttgtcatgccagatccccaccccacgtaggctcgtctgatccttttcgctcttatcattttctcctcgttcgtcttctacttgctctttccgcctggttcgatgtctgtatggcgattccgggtaccaatggagtctgtcataatgagtgagggcgacctaaatatgtgtgatgattgtttgacgtgctggggtgatgactctttcaacctggatcgatacggtcgatcgttttgttgatcaacgatatgacgagaccgcgagacctcatacgccatatccggctacatctctgcttgaaggcaaacgagaggtcatgacgcgaacccttcgaaggcaagtgaccccgacacctaagacgtttagagtggccggagcgggatggaaagaagggagcacagacgtatcaatacaggcgttcaagtgtcagtactcactagcgatagtggtcgcatggcaactccagcgtgcgagtgcgccgtaagtgcaatttttcgcagcatcgatgggacgttgacaccgcttccagccgccattaattcgatgtgtcggatgtcgtaccagcttggccgtgggcccgggtcttggtcatttttacgtggcttcagtctgcttcggcaaggagccgtggtgtagtctccatttccttccttggtccatggagcagtgcaaaaccgtccgcctgagcgctcggacgaggttccaggctaagcgcgtcgagtggtccgccgttgcaaactatcgttacaatgtttgatcaaggtcaaagttggtagagggagagagggtattcctcatcccccgagtcccgaaatcacatttctcactcgtcgttccacaagtcgaagcggagtcgagagcgtggtgaatatagatgccatgatacttgatttccaaccgagctgtcgatttcgcgtccggtgtagcggaccgtggtcgtcgttggcagcctatcgaagctggtccgtcgaccgttctctattctccattcgacaagattttagagttgtcctccagtcgagggccgccagaccttcatccctaaagacgatgcgccaaccctttgataacacgcacgagatgcgaacactggccactgggacatacaaactgacagaataaaacgggctgatccgcacgcattcgtcacgagatcggtttttcccccacttttcgcttctaattgcatacctgctgttcactcgttcgacagactcgctttcggcaatctcacgagcaacggacagcgccgtctcgttcagtccgtttctaacgaaatggaagatggcaagctccagcatccagccactcgtaattcggggaaatatgacatgcccattcccacccctcgacgtcattggctttttgctgtgcagccacgtcgcatcatagaaaccacttccggaatctcacatcaaattgccgaggtggagcgcgttccaagccagcagagcacttgtgcgtcaaacgcgtcgtggagcaaccgagagtattgcggatattatactcgaccttgctatgcgttcaccaatcactaaacttatcaaagcattagatcgatatgtggcaaatgacgatcctgtgaagcaacatcacgccgtatggaaacaggtcaccctctcgctgccggctccgctaggccagactaacccaagctgacacgatccgtggccaaaaacgcggccgcccttttctgataccgtcggtcactcgtcgccgtcgatggcgccgcgctcagggccctccggtcggagtcaaatctggggtaacaaggtttgctacctgcatctcaaaaagaaatgtgggattgcctccatcggacgttccataccgtcaggtccgcaatttcgactgaccggcatcgttggcatcttcgccgacatggtcgtgaaagaagcgtgagacgggttacccggcttaatcatgtattgtccgacactcagtgacctaaatgccctaattgtcgcgggattcggcttcgcgggaaggtcgggagtcagggttttcattaggagaatttcaaggttggacatcgggaaggcaaggaaaacgaagccttccttgcaacagcctaatagatacattatcattcggggattcgctattggctacatctattcacgtgtgcaaagaaccattgtccattccatctctctaggcttggtacgcataggcttcaggctgcatagcgaagtattgactggcgacgtcttcttggtgcatttgactgttttgaagtcgagccttggcttgtcgacgggcttcactgttggcctttttctcgagcgcggcaatcttcttcctgcccgggcctctgcgacgaacggactctgcgtattcacagacatcgattcctcggcgcttgcaattcatgcatgtggggcgttctcccgagcatctgtaggatcgtcttgtcagcgagatggccgaaatgtagacagcattgtgcatgactcacttgagtttcttgtcacggcaaccctgacaggcgatggcgagcttgggtcgattgcccttgcttccgtatctagaatagtccatcccgtcgaaatgagcaggaagcgtgccaacggtggagctcctctgcatgacacgttttcttccgagattgctaggtccagcttgtccccatcctgctgtagacggagccgagctgtcttctgcggtgctggagagatcgtaaccggcgcccagaccaggataaacagtgtgcacatcttgcagttcttcaccatcatcctcgacttccaatgcatgtggagccctggtatgagcgagcgggactcgggagaagccatcaaagttggtcgacccgacttgaaaagtggatgctctcgaagggtgaccgggtcgagatggaacgtgcgcgtgcgcgtacgagttgccaccgtggtagtcatcgtaagcgggatcgcttgagacatgttcattcggttcatcctcatcggacgagaacgtagagtggcaaagcgacgcaggagtcccggtttgcaacatcgaactgcccatgaccgaagtcgacatggtgttcatcgtcaggggtggcggtaattgagagacgagcggcaaggggacatggctagtcgcgacggtggcgggaacggacacctggccgttgttgtagagcccagcggtctcaggcgggtagtagccttcgatggaagagggtcgttggagcggggcggtggtctcaaaagggaacgaatctgcaggcacgacgccctggtctgctggccatcgaccagcgtaggccggcatagaagggtccaagccgtacactcccgagtgggtgaacgcgcccgattgggtctgagactgcgccatctttgcccaaggctgctcggtaaatgttccaggtgccggatgtgacgtagcgtgttccggctctggcaatcgaactcggccgatgggtaccttgcggcgaacccggctgcgaaccggacccgaaccggaatccagaccgccttccgaagtggccatgtgggcatactctggagcgcgcatgtagtgagtctgaggagcgctcgtggcttgatacgcaaaggttgcgtgttgctgctcgttttggtgagaagaaccggtggaactgctcatcacgtaatggaccggggcggagctcgagccctcgggagagaacacctgcaccgggacatgctgatactgccacataggcggttccacgagcacgggttgagagtactggtggctaggtcccgcactggcactctgcatatgaccagtcgcgtagacgggactggtcgagtacgatgtcgatggcgccgaggtgtacgtctcggaccaattgattgagctcgagggggaaggatgagtcatagggatggtggcctgttgtggcaccaattgctggtaggtatatccggggatcataccgccctgttgctcgtaagcacgaggacgaggagccaacgtggtgggacctgctacctcgcttgcgggctggtagccgtagatggaacccgcactgttcctagcttcgctaccgatcgagctcgtcgaaggcgcgtagggtgattccgggtgaaggggtgtcgactcgagtgccaattgggaggtcagctgaggcaggtctgacgatggaagagactgaactggggacgcaagtaccagatgcgacggtcgtccattgcgcgtcatcgcgatgggttggtgcatcatggcgtctacaagcgagctcagtattcgtcagtatcgtcccgactggtcactcgtatgtctgacccaccagatgcgacgagaccataggcggaatccccagacacccgtttttgactaggaatataggccatcgtccgggtcggcgtctgaggttgacctgtccagccttgaatggccgaactcgctgcctcgtggacccggggcaccgagtagacctgaccacgagcaggtccggggtggatggaacggtgatgagggtccatatcgacctgccagtagggaggagaagaggggtaggcttggtcgagtgcggacgagtgatatgcgtctgccaacaccatatgagtgattgaattgctcggggtcgcctgacaatgcctagagagaagccatagaactggcctatgtaagccaagcgccagacggggtcggaacccgcatggactgtgtcggggtttcgtgtcactcactatataggcagagcgaacgaaatacctgaatgcgttgttttagccgatatcgttggaagcaatccgtccaatcgtccagaggtggcgggtgggaaaagagtcggaacgagtcccggtcgttgttgtgaagggtgtaggctttctctttcagaagttcaatcgaggctagcgagggagctagtagaggacccgtgtttcgtcctgctgtacctcgttagctcggaattcgatcgaagagggaaacgtggtttgggggtagaaggttgcgggtctttgtattatttggtagtgcgagtgggtctggagcgcttcctcctatagatagtaaatgcaccgaagccgagatggagacgacgagggggtgtgcgattgtggtgatgacccttttctatcctggttcccatccatccgagccggtctgtctctttccttccgaaatcaaatcgacgtgtgagggcaaacggaaaccctcgagtccttccgcattgatccctcgtcttatcgagggtgcttgggttattcgacgtcgacacaggccgccaagtggaccgtcgcggaggaggaaacgaaggctacttgggaatggacgtattctgaccgcaacttgagcggggtgtcaagagaacagacggctgccggctcacatcagcgacaccacaagacccgagaggaggaaagagacgaacgcatcatcggagagttgctgctgtgtgtgaacgggccacccaccccggctccctgtcctcattccacaacctctgtggatctgtcggtatgaggcataatcttcttccgccgcttcctggccctcgagtgagagacagttggagagatgagaagcgtctgcggtgtgtttctgttcgaaacggatctattacttcggctcacgggccacgagattctgcccggctccccctatcgatacgccatcctgctctgctcacgccctgaaccgtgaattcatcactcgggcccacggtacacccacgtttttcactcctggccatccaacccgggcctaaaccttgtcttcggctcagctttttcttggtggcgttcgagttgtgccatgcccagaaaacgtgtcttggctgtggcgcaactgtgctcgtccctggccgtcacccctgcccgtcgcatcgagggcggcatcaatcccacacccacgcacgcatgccgaatggggtctgcaagtggaaagaagcccaagttcaaaccttgtcttcggctgagcccagagaagctcttcacgttcctgatggacactcccgctatcgatggcttcgcctcgatgcgaggggacgagggctctggtgttattaccggaagggcaatcgatatgggtctcgggcagttgaccgatcatgagacggattgcaagataggagcaaattgactgatgacgatcggcgcctagagagaaattgatcccgcctgcgcgtgggcgagagcgcgagcgccagaggcagagagcgagagccaagacttgacttttcggtgtgtttattgaccgaccgtgtcgacgggcccgtgacccaaagggaccggttgtttcgttgctcctctggtgcagatagaggtcctgccccaccgtcgtagccggacgacccggtttagacacggtttgtcatccctgtctcccttgtttctttcttttttttcgatcggcttgaacggttcagcgggtgagcgggatgaaaatgacggtgcgaagaattccaaacttgtcactgtgcaggccgacgatacgttggcaaaacgtgggccggagtaaaaaaacagaagaccgtcaccgagaggctttcacacacccactgctcgggccgtcggtggcacgggcccgagatgctttggcaaatgtgggaaagtggacgtagcgagttttgaccagccgaatgaccgatttgcaactcgatgcatgacgtagactcagtcgagttggtgtgacagaagtggtcttgttctcggtccatggcgtcgaatcgaggtgaactcgacgtctcatggatcgcatgagaaggaacggtttgctattcagagctggatgacaaggtgtacacgatgccgaagtggatattctcgaccggcgaccaagatgacgaaagccgatgacatcttggccgagagagacacgcaacaggagggagtgagggccaccctgaccgtgtgcagcaatgagattttagatttcgatgacgcccttatccgttcctgttttacgtgcgtcatacgcacacacatcggcaccctcgctcagttgcacatgttcaaacgtaagcgagaagaaatgaaccgaaggtggatctgatatttagttttgggcggggtggctgggtggatacgcggaccgttccagcggggaaagtgatttcgcgttgctcgttcggcgatctcacgtgaatctggtgcgatccgttcgatgtgacgggaaacggatcgagcgtggaatcgattggatcgagttcattcatgatcccaagccacatagccactaggtacccgtgggtatggatgtggcgtgtgatgcgaaagttgattttactcatctcgatccacgatgacggttgatattcccgatattccagccatcccaagatgtcggtataacaacagttgccacgatctgatatcgcatattcaattctgtattcgatctctggaatagaatatgcgttcttgtagaaatcggatcggcccgcgccggctaatcacggtccgggccgggatgacctgcatcggtgttcagctcacaacccaagctttatcaccatctctggcctctggcacggccaaagacttgatctcacagcatctgaccaaaatcacccgctatacgtcttgagcttcagatgttggtgcgaaacctgaccaacctcgtcaacaagaactcccgcgcgacctcgttccgacgatacctcacgacctcgcgacgaaccgcaatgcctctctacatcgcgcaccttccagactacccaaactccctcgaacgtaggttgagcgtgaggcaaggtcatctcgaaagagctaccaaggacaaggaggcagggacttccggtacgtctcgaccgactttcgatcaggtaatcatcgcgagctcatcccgggaaccaaatcacagtctttggccgagcgttcatctcgggcgaacatgcaagtacatctcaaaacccccaccccgctgtcgacgcatcaaaacctcacccggggatggcgggaagtatcatgatcttcaagtacgctaccatcgatgatgtgtgggccaggatcaaggatgatctctactggacggcaggggtttgggacaaggagaacgccagggtggatcagctgttggcagctcccggagatgatgcgcaagaggagatcaaaccctagtcttcccgaatcgaccaacaggtacaggaggaggcagttgtacgagaataaacgatcggcaatggagttacaagataattatcaataggctcgttcgctatcatgtcggtcaaccccgcgcgtcgtcgtgcaatcggatctcgcctctcgatgtgctgtactcggcccggcgtcgggcatacctgatcatcgaagcagagtatttcaagcccgctcgacagcttacccagagcgatgcgcctgaagcacttccctaagatgagatcgtgtgcggtgatctgtcgatggccgtctttctcccgacttcagcacatggctctcgttctagaagaacgacgattgcatgacatttgctgtcggaggactatcacgatttcgagacataaaggcctattttaatcggaaaactggccgacccagttgaaacatgatgtctgcagtgagcatgactcgctatctgggctgacagccactggaactgagtgttgcagcattggttagccgatcgagccgacatcctgagcgtttcaaacttagctcttctcttgggatcgggagcggcgatcgatcggggatacctggtattcgggagcgattacctctcggcagcattgccaaaggaaagcgagctgggcggtttgtctgaaccttcattcattcacgttcgacccttctggcaaatctgatccgatccgcccttcatgtctggtttgatcctgtaaaaacagatttggaggcgatcagcacgacaggcttctacaacactttcaagtaatgacatgccttgaagtagtcaaagaatcttcccacacattgacacatgcggctagattgatcagaaattggtcagcgcttatggagagaaacatccttctgactctctgcgagatcggaatctattggcaaagcagcccggcatctactacttcccggtagtcgtgagcgacagcgcgagtgacaagctgcgagtttggcctgtcgagcggtgctcatcagctgatcagatcactacttaaatttgaacctagtcctcaagaattgatctcattccacttcgtcgcttgaaattgttgcatggccggatgatccgcttcgagccagtgatcgcccgcttgctcggtcggctcagggtcttccaccagcgcgtttcaggttgatgatctgtgccagctcagccgcgtgatacacggaccgatggacccgaatcgtcttcacatcgaccgcgtccccgcgatatatgccagcggcgaagcatgtcgcagcggctactttgtccatgtgcaacagctgatccgatgctagatccaaactgatcaagtttatcttggacaagcaaccttgggctaggaagcttgagcagatggtgctgggcgcaggcagtacgggcgcatcgtcattcggatccggcgagttatgcagtcagacttcaggacaaggacatcgcgcttgaagcagcacatcgcaaggtcgagcgcgtgaccacgtaggattcgaatcaggactggtggctcaccgtcataggatatttcgtgagacgcccgcttcagcgatgatttccctcaattggtgaacaatccctacttcagcccactttttcaatgtcaacaggacaagaggatccccaggggattctgatggtccacaggcatcgaagtctgctccatcgtcacgtccctacatgatctcgggaaagcatacctagatgaaaggcgactactcaagtggaccaggtaagcaaggaagccgtgggaattcggctacaatgctgtcacagcccaatctgcccggagcgattgttgagcaatcttctcaatgctggtccaatcggtgaatggctgttctgggcaccaatcgcatagcgacggagaagcaagaacttgccagcaactacgcgactatatagagtcaagctatgtcaaaatcacatcatatcatatcacattccaccacatcgtcaaaacatcaacacgttctaccgatggactcccttttgactcgtccctctatagaaaggaaccaaccggctgagctcttgatatcgggaattataccggagttcaaggacttttctcggcagcctacggaccagcagggggcaattgccatggctcgacgggtgcaggagacgatcatgcgggatctaaacgttcctttggagatgcttgaggtagtcaagtagctcgacgctgtcgtctagcgctcgtgtctagctcgtgagcgacatagcgtagcttgacatccggagaaagaatcccttcccagcgtcattacccagtcgacgttagtcgtggccaggctcttgtcaggccgagctattctatgggtagcaatagtgttttgggcgtgcggggctggctaccttgccggtagaataggagacacgccagacgaggaagagcgacattggcattgtttggatccacgagagcttgacgatctaacaccgatggtcactcgtatgtaaagggcatcttcccttggtctgctcgctcctcgaggtcttcgatactcgtggctctaccaaaggtccttgagaaaattcgttaaacggttccatcgtcggttggacttgatcgtttgtccgcttgcgctgtagctcttcgtcagagctacttgttgtcgaagttgtcgtggttgcacgggcggcgagttccccttatactcctgggagcgatccagcaaccttgtcgtccgggtcttttgcctgtccttttgcatttggataaagtactcgagtcccgccgcatcgtgttcccaatgaaaagctcgatctgttcttttgctgtatcccatcttaaacaaagtcatggactgcttgacagcatcgtgaacaatacatatcgtaataaaaacacaccctcgccacgctcatccccgtctactgcttctgaggtccgtatcctcgaagaccctcggcaaacttccattcggtctggttctcccgactggccgaaatgtcgataccggcgtcggtgatggtggcgatttggtactaatatgccgcaaagtgagatgatcaacacgagaccatacggccgatccactaccagactcgccttgttcaaactcctagcatctcggtagaacaacaccttcatacagttgtccaaaaccttttcggcttcttcccgggacaagagcagtccttccttttcgcctcgcttgcccgcggcttctcgttcctcgtaagcttctctgagcagaggctgagcaaagtgggaagcgaatccagtcgccaaggttggggcctggtacgtggttccgaggagatcgacgtatccgaggaagctgcagtgacacgtcggcagaggtcagcgcggtgggagactcgacgtcatgatgcccgggactcgcctcttgccatccttgactccacctagaacgatggcgttccaaagcgggttcagcttgctccttcgagcgtacatgacgttgctgaggtattcataaatctgctcgggcgccagagctgggtgtgcgtcggtagtcgactgggctcgctccttggtactgtgagtggggaggacgttcgttcggtgggcatgggaagacgacgtgaggagagtgtgcgggtgcaaaggcgaatgtcagcgatagggactcgcggcgttcttttcatattccacagcgaccgcataattcgcgacaagaaatcgacaagagtagaaccgagaaggtccaccgtcgtaccggatagattcgaggtccaggttgtggtataacgtcattgacaacgccgctaccagcttgttggccttccatcccactgcacgtcgctgccacggtgtgatgacgggaaagacgtgctgggcttttcacccgacctccgatctgcacggcgatcctctcgtcgagcccggacaggcggctgcgtgagccttcccatgtttcactcccacacgccgctcccccgcagccccattgtcacctctaccttcgcctctcaaaccccgccacagcccaaaaaaaaagcccatgctcgactcacacgacaccctccaagatcttcttgagatattggaaatccgacatatccccggcgacggccaaacaggtatgactcgagtgtcccttcttcgcggccggggcggtggcggcatcggggtttccgtccttgacgtcggccgactcggacaagacgcctgtccccgcggtcgactggctcgtctgtcccgggtgaggcgccgaggacgagtagagggggtagagacgctggatatccttgaacctggcgagcgagccgtacgaggctggtagaccgggggttgtcataaagtaggtcgatagcgtgtacacgtggcgtcgaggcgaagacgacgacgatgacgacgacccgtgaattgtcccagcgggaaaagtatcccagggagggggcgcgcggtcgtcaaaccgaaaaaagggcattccgattacgaccagatattcagccagaagcgagcatgttcgattggtgattccggttgagcaacaagtgcgtgtggcgtatgcggcaggatcaagtgagacgcaagggcgtacacgagtcaccgggcggttcgaggcgatcatcagcacgaacaaccagaagggacgaggatcgacgtgccaagcgcaacaaaacagagcgcaatcaaatcaaatagaaatccccgcgtcagctcttacgcctatcaaaaaaaggtccttctgacgactgacccagattatcggcggcgagcatgatcccatcggcatacttgatccccaagaccgaggttccggtgacgagcggttgtctatgaagttcagtcccgtgtcgaatttgcgtcgagtggttgtcgacggatgacgggcggggttggaagagcaggcggaagacggtcgttccggtaatgacatcgtgccatcacgtatcggttgtgatggcgtgtacgagaaaagtcaaagccagcaaaagaccgagttaccgcccataccgaatacatcgattccgcaaagcgtgcatgtcgacaacatcacccgcatgtcgaagaatcatccccaaccgtggatgttccaagcccgatgcgtcgtcaagattgatccgagtggacgatcccgatcccgatcccgattcgaatccgaacacgcaataacgcgggacgatagacgttcgtacggtcagacgtttacgtcattcgggttgaccatccatccggtcgatttcggtgtgatcggtgtgatcgagtcgatgaagtcgattcggtcgatgagtcgatgagttgatgagttgatcatccatggatgcatcggtcgagtgacaagaggtcgaacaacggatcgatgtttcaaaagaccgccggggttttggaggaggaggacgtcgaggatgattgagaacggggtgatcgttgaggatgaggagaacgggcgtgaaggaggcgggaagagagaaagcaagagaaaaggtaacaacaattcaaacaaccccgtgtcagctccccgtctccccatcaactcgcatcgtgaccggcttataactgactgggtagcctgtttaccttgccccgatgaggcggccatcaagaactcgtttcctgcctgggcgacgtcgtaccctcctgcctgcgcatgcccatgaccatggccgtacgcggtatgctgagcgtggttattgatgggatgttggttataagcgtcaaagctctgttgaggggtcatgatttggccccatgcggaagggtgctatcgtgcaaggaggacgaggacgaggtgtgtgggtgtgtgggttagctttctccgtgagtcatgagtcggggagcttgatcgtcttacgtggttcatactgggcgattttcttgtttcggcgtggttcaacgatggatgtattcgagtatacagaggtgtatgatgttgacacgaatggaaggaatgtctattcccttttggagacgagatgtaagctgttggttgttgggctgcaggaagacgacactcagtcgtcatggaggggtgatggcatcggaaccgaagtggacaaagggctgattaggtaagcgcaaggtccacgttgtatcacgtgatccaaccgatgaccgggtgataacgtaattgaaatgggatgactgcttaggtaatcagcaccgaccacctggcaggcagcatcacgtgatgatatgctacgtcatccgatcttgttttcacgtgactgctgctcgagtcccctcggctaaaatctctcgcgtccctccctatataacaacacaaagagctccggtccatccatccatcccacatctactcctctctcttcctttcccctccccagggaacgctcgcaaaggatggtctattcgcagctcacaagacacacaagtacgcacatattagcaacatcccctcgtgtcttactctcgcaggtcgtggtgggaacgtcccgtccaggagacgcgctgttgatggaggggaaaaggtgaatagggaacgcagacgatcgaggttacaagtcggtcgacggtccggaacgatccacgaggtcagatcggggtctaggcattgggaatgatcccgggtcgacgctctttcgaggttcgtggacgaggagactcgacgcgtggaggaatgacgggttggggacggtcgacgaaacatcacaccgctgtcccccctgcccatcccttgcgaggtccttcgtccccctcgatcgcggctgtcgactcgagatcttcctgatcctatacgtccttcttccctctccggacccctaccttgtacctcggctcgtcccttctcatcccactgtggtgcaggtgatcatggtgaccccacgcacccatgcttttcgcgtttgtaacgcgctccgcatcccatcctcgacaagcgcgcccggaaccacgccggacgacccacctcagacgtcctgcaagagaggagcgagaatgttgtgccaagtgctcgcacgtcatccaactcaaatcgctgtgggagaaagtccccggagccattctcctccttccacctctctcggggggaggtcgggggagaaggaggtcgatatcctggtcagtcttcctcggtcggttcgtcggcatacgaggtcggttcgtttttttctattccttttggctcgggtttgggggaattcccttttccattcttttcgatatacgatacacgtctacactccaccctacccaaacacacgcacatacctaacgaaatttccggacttcggctcgactcgaggactagggatgtacctaccagcgtgaccggcgaagacgtcccaccccgaccgagccccattcaccccctcctgtgccctcctgacctctttcgcccgtgttcccccctctttccgtccgcgtcgtccccccgtggtttcatacccacgggtgcggacctctcggctgggggatcaaggaacacgtgtcgactcgggtcaacccgttgggctcggagggtcggtcggtaacatcccggggtcttgttctggcgatcagggttacacacctcgatcatctcgcttgggattccgggttggtcctttaaggggacgggccgagagggccttgcttcatcccaaccccttgattcgacttgttctcctgcgcttccgggtcgggttcttccggctcgggggatgtggaggacgaggaagaactcgggggggaagccactcgtgttccgagtgagatcaggacgatcagagatgacatcgagatcgtcgtcgtcgaggtctggaaaattgggtgcttgtgagggtggcagtgctgcgtgtttggatactgggggggaggtcggaatccatgaacgaggtgggcctttatagggtgggagggtgatctcctctcgcccaggtcgtactcgcgatggtgagggcctcccccgcttagaccagctcggtcgcgtgcattggataaagatgcagcggatgggtcgtcgcttccgcggacctagaatcgacctcgacctcgaacacctggaatcacgctcgggatcgtctcttgggtctttttgtcaaacgatctcggcctgctacggacctaccggaacccacgggctgttcctctcgacgctcatcgacgctcgtcctcgtccccccgggacaaggcttacctctgcagcctttacccggcactcgaaacattggcagtgggtagccttggacgggcgacgcgtgagcgagtcgggagggatgacggtccgggggtcgaaggggtctggtggcagggtcgaggtggtttggcgggaggtttcgaaggcggtcctcggtttcattttcaggtttcggggttcggggtccgattccgggttcggcgggtgctgtgatcgtccctctttgtccacgctgcgcggtcgaagacaaccaatcatcgtcgaaacaagaagggaaaggaaacgactcttcccaggtcaccccgctcgagtggaaaagacgacgattcgaccgaccggtcgactgaaccgccctttgaggatgaccaggcaagacctctagcgctcatagcaaaacagtcatacgatcgaaccctccttcccatcccgttcgctcctttctcgagaggagcgttctggggtgggggtccacgctcgatccacgttctttcgaaacgcgggcgtcggggtatggggggtttaacacgacggggcttattcttgcgcgttccctccgagacaacgaaatcaaacggatttggcatggtcggagatgatcaagaaagaggatgatgtccgtgatggaggtgtgtgcgaaagctgttggggggccactctacagcccttcaacgcatccggcgtcccctcgttcgcttccccgctctcccaaccccttcctcagacgttccaatccctcttatccaacccatccgtggccacgcccaaagtcccctggacgttgtcccgtcaggagaagaaggactatgatcagatctttcgcgcgtggacgggtggggaggggggtgggtacatcgaggggagtatggccggagaggttttcgggcagagtgggttgggaagggaggatctgatgaaaatttggtgagtcgcctttgggaatctgtgccgcactgcgggcggtattggtccaaagcggagacgggcgggacgcggatcgatgctgatgagcgtggatcgcttcgcgcaggaacttgtcggatattaataatcggggcaagttgaaccttcccgagtttcacgtcgcgatggggttgatctaccgaggtgagcacggccatgacctaccgggtaattcaagccaggcgacagcgctgagaccctacctctcgccctcctcgacgcatcacgtcagccttgaacggcaacgacatccccgaagtcttgcccgccgagatgatcccgccttcgatgcgggacattgactcgacggtggatttcgtcaaggacctgctcaagaacgacagttccgcccgtgcttccccctcgatcgacctccccgggactttcagcgctcaacgtggtgccggtggtaagcagcccaaggacgccagcgtatacaagcacgacgatagccgagcgacggggtacaagtcgagcgctcggcatctcgatcgcaagcaggtcaggtacgaaggtgaagacaaggacgaggagctcgggtctatccgacgggacctcgaaaactcgagcaaggtcctcgataggactgcggctgggttcgccgagcggacggaagaggacgaacggctcgagcaagagttggacgatctcaagtaccgcgtcaggcgggtcaaggatgatatcgagtacgtctcgcgtgggaaacgatcggacgacaaggacgaggagaggaggaaactcgagcgagagttgttgtacctcatgcacgaccgtcttcccgaggtcgaaaagaagatcgaggaacgcgaggaacgtaagcgacaagaagctcgggatgggatccgggcgagggataagcggaacgagacgtacgggcggtatagggatagggacgacgatcgcggtgattacggtcgtcgagatcggtacgaggatgatcgataccgacggggaagccgcgagacgagtcgagagcgtaggggaagtcgaggtgaatacgactcgtactcgtcccgacgacccatctcgcctccacccagggacaggactccgcccgctacccctgctgctcccagggacgcagtgcattcgccccctcccgcacccgctgtgcctactagcgttcgagccgccgtcccctcgaccaagagtatgacccccgaggagcgcaccgcctttattcggcaacaggctcaggaacgtctcgcggcgcgtatgcgagcactcggaatggctgctccagaggacaccccttcgagttcggtcgactctagcgtcgaggagcgtttggctagggaaaagaaggaggccgaggaaaaagccaagcaagcggaaaagcagcaggaagaacgcgaggcggcaagaaaggctaggttgcagcaggctggcggtggagctcctgaaactcccgctgtgcccgaagcgccttcgtcggccgcaccccctacacctctcaagagcgccttgaaaaaggcacccgcacctcctcctcccaagcctaggaccgcacccagctcgtcgaccgtgcccaaagctgctcctcctgcacccaaagaagatccggctgacgccgagcttcgtgctcaggaacaggctcaccaaaaggccatggaggagagacgggctcggctcaaacgtatgcaagaggaagaggaagaagctgagcgtgccgaagaggccttgaggaaacgtcgtgaggccctgcaaaaggccgagacgcccgtatctacgccccctgtcactacgagctctcctgccccggctgccgcgggcagtaccaacccgttccacaggatgggtggaggtgcttcgtcggcagcatcgcctcctcccgctgcgcctcctgcttcttccggcggcggcttcaaccctttctttaggccacctcctagccagcagtcgaccggaacccccaagtcggcttcgcccgctcccgccgaggccgaagccgcgcctcctcctccccctcccccagcacccgcacctactgtgttctcttcgagcagctcgcccgctcccttctcgcgacctcagccttccaaggccgcttttgccgccgatgacgacgagtgggacgtgattgacgaaaaagacaacgacagcgatagcagcgacgacgacgattacgccggtagccgcaaacaacgcgaggccatcgcgcgatcgctcttcggcggtgccggctcgcgagacacgtccaagcctgcctctcccgctcccgttgccaacaaggccgcgttgtccaagctcggaggcggcaacccaagtgaccgaggcaatttgctctcggccatcaagatgggagctggattgcgtaaagccgtcacgaacgacaggtccgcatcgtctgtcacgggcaaggttgtcggtgacgctgcgcctccacctcacatcagcttgacgccccaggaacccgaagcccgagccgaacctcagcaggacgattctgatcaacagcaaaaggccaccaaccgacagtcagtcgactggtactctggtctcgctgccgatgccggtccccaggccatagccgagcctagcccaatgccgtcagtcgccgaggacgaggagcctcctatcgatctacccggccagaacgtctcggcttcagccgacaacgacgacgagctcgccgagttcgacatggctaccagtacgtcgatgaacaggagctattggccaccgatgctgacaatcttgaatcacagccatccgcgttcgatccgtcttcccttacgaaggtcaacgtgacgtcgacctctgtgagtaccaaaacgattcgtcgtggcgtaggcgctctctgatttggtctttccttgctcagccttcaaggagaacatggttctgatggcccacccagccaaagactcaagcagtccctggtggtatggtctgttaatgcaggagggcaagtcgggttggttccccaacaattatgtcgaggagatcaagcgtgagtggcgaggccataccttgtcaaagatcgatcggctcctgacaaactgaccgtgttgcttcacagcccgtcaagccaaggcgtcattcccttacatggggaactcggacgaggaattgccgttcgccgagggagattcattgacggtcgtagacacttcggaccccgattggtggaaggtcgaaaaagatggcatgatctttatcgcgcctgctgcctacctggagctactgagttagtcttctctcccaatctatgaatcgaggtcatggccttccaaaagcatgctgagtgccactgtgcttgctccgctcggtcacaggctgaataatatgctgcctttcttgccttgtattgcatgtttcgaaattccttatacaccatgaaatatgtttttccaacttgcgaaacgtctagcagaatcgcagggggatgtcgcaccccctggtcacgggttcactgccgccatacctcaggcgctccaaaacgtctctagctctccacaggctgaggccgtcgaggcaaatgaccaatctgacgctgaggtggacaacgatgacgacgaaggatcgtcttctgacgatagtttcctatcttattttgacgacagtgacgacgacgaccatgaagaggaaacgcaagccgctcgagatcagcgtgaacaagccaggaacgcagtcctgcaagcggcaggcctgagtgtacgccgaccacccccaggggtacctggacctagaaagcctcgaagacgggcgccgccgcagcctccggccactgagccacaggacccgtcggcgggaacctccctctctcctcccttgccagcggcgaaacctcgtcaccaggaagtggtgcccgtcggaagtggcccagatgcatatgatcgttacgaagcatacctcgctaaaacagcggacgctacatcaagagctcgatcccaaagcgatgctcgccctgtgtcacttgctccaagctcccccaggcctggatcggcggtccagactccacctcctacttcctcgtcagcaatcccattgtctagcggaagggaaggaaaactcgccggattcgttagcagaatcagtgcgggagcctcgcaaacggtcggggacagacggacgacgcctgcgatcagcggtccggtcagcgtcgttcgcgtcgaggatgggcaaagttcaggagaatcgtcaggacccacgacttggtccaatttggtagatgcagagttgttgaagaacattaccccccaggagaggaagcatcaagaggtatgacgatcgcagggtggatatatccgcaattcgaccgatccctgagcaataattaccacagacgatcttcgagttcatcgccaccgagggtgcctatgtgcgagatcttcaattgatcgtcgaggtgagtctttagaccgttcgttgccatagtgctaggcatactcatcaaacccaacgagcagatcttctacattccactgctacagaagcttgacgactccacgttgggaagcatctttgccaatatcgaagatattctgctgttcaatacagtcagtttgggcagagctttcgattcagctttctggtactgacggcataggatcggctcatcagactctcctcagctccttggaggaacgccaaaaggcctgtagactgtacatcgaccagattggtgacattttcgccaatcaactcccatccgtttcattatacaaagtgagcttggttcgattccaagatcggtgctcctccactgactggccgtatccctaagccctactgcatcaatcaagcgcaaggtattcgggtactacagtctgttcgtgagacgaacatggaggttggatcactgttacagacaatcagaacggagaatctaagcgttcgaagtctagatctatccagtttcctgcttgagcccagtgagtgtggtgggtcccgatttccgcctgtccgaaatctgatatgtacgtcgacgcctcacagtgcaacgtctgactcggtatcccctcttattgcgacaagtgagttgttttccagtatcaggcgaagtatatgcgacgtttatggacctaattgaacaaaccagatcttgaactacactgaggggatggaagatcaacgactggtcgccaacgctctcgaagcggtcgaaggggtactatcaagcgtgaatgaatcagtccgaaccgccgagaacattgagcgtttgcgcgtactctcggaggaactctggattggacaagggtaagctaatagacgtacagggcatagacctcgtaagctcacacgtgtcctcgctagtcgcctcgacttgacggctcctaccgcattccttggtgaacgaaagctgatcaaggagggagatgtctccaaggccaagagcggccgaagcctacaggttgttctttgcaacgacattctcgtactgattgaatcgaaaaatctttaccgcatggtaagtcggtgctcgctttgacgtgcattgtgaatgcacgttcatcttgtgtccgcatgaatcgcagccctttcctattcacgaaatcaccgcaaagcaggcttccaagcgggatccgaccgtgtttaacatcaagaaggattaccgggaatcaaggaaggaggatgtggtcagcttgaagtgagtattcgcattgtaagaagtattttgccagagaacgctcgttaatccccggtcacagggcaagctcggcgaaagaggctgagcgatgggtacaggccatcagccaggcgaaagaggaagctgtccgcgtgaggtcaacagaggccaagcagcgccgcagatttagcggaattggatactgaacgacacagacgtactcgaatgatacggccgggctcaagtcggaggatctgaatttgtagcaactcattgtaagaaggtgcatttatacccaagttacgttcaatacaagttgatggggttatatcgcgaacttcatcagtttcaagtcgttgagcatgtggactgatcgattcgagtacgagttgccggatgcgaattcagcccgttagcaaagaagaccacaagctacattccgatttgatgattccgcatgagctagtctgtgttgctttgactttgttttcagtctcgttctcttgcttggaccacttttcaagaacagagttcttgttctcgatatgcggaagccatgttcaccgagtgttgatgccgaacgcccctggtgcgatcaactagctggccgagcatttgctgcgccgtttgtactcggaggcagtcattaacgtttcgttgtaagagagaagtcatatcgcggaactatctaattgaaccctcagccaagccttcccttcgcacatgtcaattatcaaagagctgacaacttgcaatcagaggaggatcacgcgcgtactcggcggtccgcggatcgatgggtgttcatgagatccaacgctaaacgagtcggatacgataaaggcgtggcgcaggaacactggttcgagagccggctgtccgtccattgtcttccccaggtttgatagcgaagcaactgggaaggtggccatccctttttgcggtgcaatcgtgctataccagagacggctttctcctgaataccgcaaatcgacgtaagcgctagtattctttctgtctcctccccttgggggctgagtccctacatccccaacattgctgctaaggataaggtgaaaaggcacaaggcggccagatggcacccagaccgtctcgtatcaaaggctaagccggcgatcgtcgtgttttctatcctactccatcatagactgatttactcattttgcaacagttggggctgctcccaccttgatcacactgcgatattcctcccgcgcaatctcaatggcacctcatatcggggaatggatggagatgagcatgaagtgaggtcactgtattttgtgcatcgacattcatgatctcccgcttgaagtgatgacaagacgctgcatcccccaatggtggtgcatcgtcgatgaacagagatcttatatgtgtgtttggctttcctgtgcgcttcatacccttactgcaatgctgacatatcctgctttttgatttgcgggtaccgttccgtttcttccttgtccggattcctcatatcagtcaagaatcgatttgtagcgcaggacagatcacgggattgcagacttggcataaatcttggacggccaaaacgtgacgtaaaactctgcgtgacgtaaaactctgcgaggtgttctgccaatacctcgtgtgccggatcggggacatctcagcgaatcggtctttgttagtgaaatcaccgcaggggcgttttgccgacttgtattcaggctctgtacacgcggagcatggatcgaacttcgacgcgagcattttaccatggacacgaaggatcaaaccctccaagcgatcacatatactagctttgtaacccttcagcttaactgttttccttcgtcgccatcatcttgattgtgcgtcgcctacttcgtgtatctcgttctgaaactctccaagatctctgcgtagacttccttagtgatcttgtagtacttcccgcatacaaagaaaatagcatgcattaagtcacgcttcatcaagatttcgagccttttgtcttcgtgatccgctgacaactcgttgaggtgggaactgagattgtcccagtcccatcttgtatggctgccctgcctgtgctcctcgtacgcccggacgatgttttcgccgtcatgggctttagacgccccgcgacgtaaccgtgcatagctttcacgggtcgcggtcgtagggtcaggggacccctcctccggaacagtgaaatcggaagcggtttgtccggattgtgacatcgtgtgaaccgcaggtagtgctctgtgttacgtggaagacttgaggtctgaaggcgatgagaaaggggttcagtgtgattggtaagcccgtacaatatctagacgaaggagcagttccagcgcgtcgggttcagccatcgagttgtgccaacgactaaatacgccacgtaaaaagccaatccgctgataagctgagaagcggcggtgaaagaccaatcgcttcctttgttgcttcgccccttaggaatgcatctcggctcatccgtcaatatcctctccccttgtgccaggaggctggagggaccagtgcaatggcgagatctgaatggacttgtttttgccgatcccctgccgctaccgggggaatgctcacataaccatgacgattcgctactataagagtctcgtgggatagccacaaagacgtcatgacaatcccttgcatgtggtgtgtctcaacgtcaacgttttgtggccccatccctttgcagctgcctagatggcacgtactcacaggctgattttatttcttgttctcccaggctacatatagctcctatgcttacaaagtcataccacaaccaaacaaaattgaatcttcatgattgtcctttccattttcatctagagccttaccaaagcttgcaatacgcgtaacttgtagaggccaaagacaagttgccacgcccgagggcgactgatacccgaagcgcaatctgctatgcaagacatcgcgagcgaatcttgccattttgcgaagatgaacgtgtcacaggccaaccatgattgagagggaagtagtatgatccacctttgactacccatatcgctggaaccggttgcatttctatggggcgtcagaacacgtggtacctatctcaaggacaatcgaataccctggcgtacattctgcgcataaggcgtacatggctttgctatgggcaccttgaagtgacatgcagtttgatcggccatcgtccaccaggtacaaacgttagagcccattggctattcgaggttgacatggcaagtgatgtctagtgactactgtctctgacttcttgcttctcttatatctttgagcaccgcggaaagactatgtgaatatcgctgttgctctagctcggtttctatcgttcacgatagtcgcgctcaaggtcctgaaacgatacctgccaattccatcctcaaccgcggccacgccgggaactgatgacgaatgaatgaaacgggtcttccgggacgaccaaggacgtgtcgattggcagctgcatttatttagagcgacaacaaatccaacaattacggagatctgacagctacgctctacactgttcaaattctgtaaggaagctaaactcggtcgattctaccattatctacttgccagttggtctttggcgtacaagcgaaaccccattacgcttatgtccgttgcctcgcttatacttgctcgttttgctcgcgtcatcggctataccaccaccaccgacctagcctgggggtaatgagggggttcatccggtagaactcgcttttgatatatacctcacccgtactcccccggtctcttccaaagacaatcttcctacgccccgctagacacaaactcgctcgaatctcgaacgaaacttcttgccacgctacctctcatgacatccatcctgaacagactggctcataacaccaccgcccgatcctccatccttgcgcgcacaatgtccacccaacgagctcaactcaacctcaagaacccttccttgttgaaaagcaaggcatttgtcaacaatgaatgggtctcggccaagtcgggcaagactttccaggtgaccaacccggcgaacaacgaggtcatcggggaggtccccgagatgggcaccgaggaggaggtcgaagaggtcattgccgtcgctaaaaaggcgttcgagagctggaggcacagtacccccaaggtaatttcagtgcagtacggcgtaatgtcaggtccccgttcggcgctgattgtatccgtctgcgcatacaaagttgcgtcaagacctgctagccaagttttacaagctgatgcaggacaacaccgacgacctggccaaaatcatcgtgagtcctcgctcctcgcctcgtgctctcctaacatgggctaatcgctctcctccgcttccctctttcgaacccggcgtgacagaccgccgagaacggtaaaccgctcgcagacgccaagggggaacacgtctattcgtcctccttcctcgaatggttctcggccgaagccatgaggaactacggggatacgatccctagtaccatccccggtctgaggaacgtgacgatcaagcaacctgtcggagtggtaggtgtaatcactccttggaacgtgagtcaagtcggatgtcgaggtcgagtaattagaggtggaggtaggctgaacttggctctcggatgacgtgtgcgcatatatgcggggtggatagttcccttcggccatgattactcgaaagatcgctcctgcgtgagtctcgaccctacctcgccatcgctcagactctatgaggattgccaattagtagctgacttgttgcgtgggattcgtgtcgctcagtctcgctgcgggttgtacttgcgtcatcaaagtgcccgaagagactcccttttccggtctggccctcatggaggcaagtcccagctcagtctcgcctgtcttacgggcgccccagtcatactcatcttcctcgctgttcgcccggactttttgcagctcgcgcaacaagccggcttccctcccggtgtcctcaacgtcatcacctcgcaagactcgcccaaggtcggtcaggtcatttgcgcgagcaagacgattaaaaaggtctctttcaccggaagtaccggtgtcggcaagatcctggccaagcagtgtgcggggactttgaaaaagtgcgttgaatggctggagcagagacgtttcgagcggtggctgacgacactttctgtattgtttaggctctctttcgagctcggcggaaacgcacctttcatcggtatgtccttactgttctgatgacactcgtcttcgcggatcagacaactgacaacgaccttgacatttacagtctttgacgacgccgacatagacgcagccgtgaccggtgcgatcgcctgcaaattccgatcgagcggtcagacctgtgtttgtgcgaacaggatctacgtccaggacggcgtgtacgacgaattctctaaaaagctagtcgaggctgtgaaaaagttcaaggtcgggaacggtgcttccgagggagtgtgagtcgggtccgtatccgctctcgggtccgagtgcgagctgacttcgggtcacgcattccccatgctagcacccacggacctcttattcacggacgagcgctggccaaggtcgaggaccacgtcaaggacgccgttgacaagggtgccagcctcttgctcggaggttcccgtttgacgggacccgagtacccttcgcaaaacttctattcgcccaccatcatcggggacgttcccgaggatgccgcctgtctccaagaagagactttcgggcccatggctgccgtcgtcaggttcaagagcgaggaagaggtgctcgcgctcgccaacgataccgatgttggattggccgggtgagtcgcttccgggtttgcgagcaggattgggacggtccgctgaatgctcaatgatccttcgccctgtatagatatttcttctcccgagatgtcggccgggtatggagggtcgccgaggctctcgaagttggtatggtcggatgcaacacgggtttgatctcccaggcttcgatcccgttcggaggagtcaaggagaggtgagtgcagcagtctagcgggtggaaatattaagcgacgatgctgataccttttcgttttctgtagtgggtacggacgggaagggtcgaagtacgggatggcagactgttagtcttggtcccgttctataggtgctaagtgcgagtcccagttgctgatatatcttgcctgttcgatagatgaggtcatcaaggtcatctgcatgggtggcctaggtaccaactgatcgtcatggaacgtcagctgtacgtgaacaagtaaaaggatttggcaatgaatcgatagtctcttttgtaaacgatcttgatcgtgggtaacaacaccctctctcccgctctcggtgaggaggaatgtaccagtagctagtagtcggtaggagtagttattccgagatatcggcaacattcatcaacaagctgtgccgccccctgaatcagaaaattagcttccgagagagactccggtaggtagggtaggtctcgatggtccatcatcaaataacaacatcaaccttcagctccagatatcaacaacctcctcggtcggattcgccagtttagttcaacgctcggcagtgatacactctgtccttacgtttcaggcatgaaaggtgacgtgtcgccttgatcgcctttgggcaagaatagcaccgcctcttagcgaccgacctgaaacgaccttttcatacgaccctctgccttttgttccgggacgaccatcatcgcttgtgacgactttacgactagatcaagacctgttaatcaaggcttcacgaaccaaattagaaggctgacatacggccgacacactgaagcttccaccttgccaaaggctgggcctaccgtcatcaaggcagctttaaccaaaccatgtcgcttaaagccgagctggagacttggactcaagctctggaagcttttgatgctaccgatctacctcgagccttggacatatttacgaccatcgccgagtcctcaaaagtccacttcaacatcgggctcatccatgccactcaaggacaccatactcaggccatcaaggctttcaagcaggcgacccagctcgatcggttcttcgccgtcgcttactttcaacgaggcgtgagcatgtttttgacgggcgagtgggaccgagcgaagatgcaattcgagatggcgctttccaatatgcgggggaacgacaagatgtgagcgagcggtcaattcggagatcgagcgggtttgaaccgggacgtttcccttggctgatcagacgatttccttagtgactatacacaactcggtctaccgttcaacctcttcctcccggagatccatttcaacttggcactctgtcatatcaagcaaaaagacttgacaaaagggatgtacgagctccggaaagctagtacgagaaagatgaccgcggcacacgaggtgatcgaggaggcgatcgagaaacggggacagggatttacggtctttagtatagtaagtgcgaagcagaacgtgtggactggcggagtgggagttgatgaaccatggtacctcagcccgtcggggtcgtgtttagaccgtctgaaaacaagttgaaaaacctcgcaccaaaggactataaagggaaagcggtaggttacttgccaagacgattgcgaacgacgacccgagcttatacgatggcatgttcgctctccagaaactgatcgcggtttcttccaccgacgacgagtataccacctttaccggtgtaacgcgtttgggtaggaagcagacgccctcggggagtccgatggatgctcaccaaatttcccgctcgaaaacgttgatgaggatgggtcatcggccagatgacgccgatggagagcaaaagacgatcaagagcttttcaacgagggatcttggcgagacgcaagaggtgctcggaccagaggcggacgataaaagcaaggcggtcaaggagttgggggatctgatggacaggcgcttctcaccgtcgtcgtcgatcggtagcggatcgaaagagaacctgctatcacctttaggaggcagccaaccggtccccgtggctccagagaacgctgcgaagagcaagggcgggatgttcatgaggcgatcgaacaccctccgggattatatacgctctccgagcttcctgagcaaaagctcgggcggatcttcaggtaccgaggacgccagcaagagcaaagaaaaggacaaggataagaaatacgccccgccaatcgtcactcggggactcgactctctcagtcggggttccgcagggcaggacatgggtcgatcggtctccgaaccgtcattcgcaaagcctgcagaacttggtcccaggacagctccggccgatgggtataggggtcaattgcagtacggtgggcccttcattggtggcgcgacgaatgacggtcggttcgctgctcctgagccgtacaagcaactctcgccgctaaggccaaaaaggcctgaggggcgctacaatacctcggcagaggtatatactcgcgccaatgccaatgcaccgatgcccatacaaagatccgcttccgcggtgccgaccttgacagacgtgcgtgaacccccagcgagtttccggtcggcaccggtttccggtcagcatggtcacggtcgcataccgacagtggctggacgggacgactcgtcggcaaatagtcaggcgacaggcgtgactggcaagtaccccaagggagctgtgaccccagctttcgtgttcgaggaagatgtcacaaaagaagcaacgggcaagaccagagcccgtgcagaggtacggatgacggaactgtatgatggctactacggcagcccggatagcaatcacgacgaagatgaggcatcgtcggtgccaatcccacctgttccagtattcaacgcccgcttcaagcaagacgagtctgaaagacccctcatgaaacaaaccgatcgagccaatccgtcggtccttatgcaaaatctcgagaaactccggatacagcgacaagaaaaatccgattctaccttttcaaggtcgtctccagaatctggctctcaatatagtcctgtcgtcacggttcctcaatcaccttacgaacacggtggcatatcgctcaccaagaaaccgactctacttacgcccgccactggatcgatcaacgaatttcggagacagcctaccttccgacgcagcccgctaaacagttcgaatttcgaggacggcgaattgatcgacatggaaatgcaatcaatccgagtcaaggttggtcattcacgttggactgactcgtcatcaggcagaacagaacgttgatgaagcctgccacttttggaatcgctcagatccgctataacgacgatatacgagccgtggtcatctcttctcaggtcaatttatacgaatttaggaatctgctatgtgacaagttcgagatcccagacgtattcaaactacgctttagggatgaagagggagatcaagtcagtctcaaggacgatggagactgggacgcagcattagactacgctcgagtcacggctgctggacggccagaagggagactcgatgtatggttattctagagattacgaggatagaaatacgagatgtgataacgaacggaagcttgataaaacgcgctgcgagaattcgaggatcaccacgagcattacctgaacagcccgtgccgagaaggttggataccgaggaattgcaatcgctcggggcaagggtgaagatccgccggggcgtgatgaaacaggctttccagcaattcctttgtggaaggacgatccttcgcagggacgtctttgttcgcatgcttagaccagaaatccttggcgatctctccagccattcgcttgcccttgtcatagttgcgcttatgatcgcgtttctgatgtgatgcaaagaggtcggtctcgttcggctgacttgtctgcatttgagacggacgagcagaggtatagacgtttgcgccttgggttctcagctgaagatcgggtcgaatgaaactctgcatgactggcttgcggggaactttcttgtggacagactttgcgacttctgtcgcttgttccggttggacgagatccggctcgggatagccgacatatcctccttcttcagcaccaggaaagatagacgcgaagcgctccggaagcttttcctcttggtcagaggtcgacccctcttcttcaggttgctcctgactattcaacttcgagatactgcgcctgttcctagccatctgtccgctctttcgtagttgaaggatttctgctttgctcagtcttctcagctttggctccggttcgggagcgggttcaatattccattcagcctggatctcctcgatctcggccagcatttgctgtatcgatggatgataatcttgcctagtagtactcgagactttccgttcgggctcttcgggctgcgagtcgcgaatcaactccgccaccggataaaagtcgtcaagacaagtctcgtcctcttcgtagatcctgacgggaggaaagggataagcggaagcggtgtcccatctgggtgtaggggttgcgacccgggatgtatcacagctggaagccaggctgtcgacagagtcccggctcagttcggggcattcgaggtcgagcggtgaccatccgcgcaggggagcctttgtcggctgcatcaccgggatgaaggctagaggatcattgtcctgcatagctctcctatcaaagctgggcggaaacttttgcactcgttgacggttggcgctccacttccatacgggagcggtttgactggttgtcaagactagcctcgcgctgtacgacgtcggaaaggaaacaggatggctgtcatcaaaccccgctggtgtcacgatagcacatgggccctccggcggcaaggtagaggaatccatactggccataggtcggtgagaggagcccgaagatgaattagtcgctctctttgctaccctgggtcgacgcgtgggtagtccaggcaatggtttgtctaggttgcggtgaccttttagtgcgatggggtccgcgaattctaaatcgggaatcagatccgtttcgagagggagttgcgaggaatgaaaggtgacccttcgattggaaaaaggccggcttggagattgttccgcttcttggatcctctgcatcgctggtcgaaggggactagctggaagggactgagcatgacagtcaactgggagtacgtggatggacatccttagcgataggtgcggatattcgttgtcgagaagttatgatgaaaaaaattgttgcaaagatcggtgattgttatcgctggaaaagagaaagtatgtaagacgagtcgatgaacagtttttgtcgtctcttatatactcgagtagtgcaaacgggactgcgagacgcgtcaactatccagcccgaatcgcaaacttgaaacgcgacgattgacaggcgcgtatcgcgctccgacgaatccaatcatccggtggtgtcatcaccggtgacgtcggggagacatcgcatctgcaaacgccgtaaccggttagagcttgatgactgtgtcttttgacctgatatcgcttagataatggcttgatcgccatgatttccgcaagagaagactttcaggcactgaagcgctcacggaaccttctgccatcaagttcctagccaaatcagacagttgccgttctagaagtcgaagaacacacaagagccactgacgaactttaaaatcctcctctcaaaggctcttatgattctgacgtggccttgtaggcggcaccactttatcgctcttatgtaaacgctggctagcttgtaatcgacaaaaccagcatgatacgctcggttgttcgttgaattgcccacatgattgcggcatacctaaacttgacctcgcacttagagtgcccgccttcagatgaacagtgttgtatctgtactacttcggttcgacgttcgtatcagatcgggtaaaaccttgcagaatgggtaatcggaacttgtagatacgcagaatgaaagcccccaagcgatgccgaaactgcttgatttacccgcaactagagatgcgagtcggtgagataggaaagacgtaatgaagacatatttacccaatttggcagaatcggaaaggtggtgaagggtgctcttgctcattgagagtggtagattacgtcgcatcaagaaattgagtgcaggtccaaatgctctttacaaagtcacaagtgatgccgtctcggataggactccgcagccacgtctagcaaggtgacttcgccgccatccgatcaaaacgacctgtcagatttttgcacgacacgccgcttacacctcgaatgcggtggtatcgattcatcgtggtgcacgtttctgtttatcatgatacatctaaaagtcgggaaacaagttgtcatgcgggcccgaacccgtctttccgtaagccgtgacgtctgcttcctgatatcggtcgaacctagcaatcgtggcgacctgatgagcttccgggcggatatccaaggtgccgatctagaaactcactggctagcgtcaccatctccctcgatcttgggcacgtacggtgcggggatttctctccgatatagcttgtcccagtcgacctctgcgtaccatccgtgactgaaaatatctgccgaacctcctcgcaagtttccaaacctcttggtcagatctcccgtcagtaggttcttgagcagatcccgcgccaagccgtcaaagtaggtgggataccgtactttgccctgtgtcgagcgagtcgagtcagctcgtcatcgaggtcaggcgcgcgctgagcaaggcagggcttacagcaataatctacgaagacaagaagagagaatgagcgaagagtctcgttgtcgttcgcttggtatctgggcggctcaccttttcatacaacttcatcgggtttccatcctcggtaaagaatggtgggtatccagcctggagagacgcgtcaggataaggttcccatcggcggggagcagtacatcttggcctgcatgatcactcacgagcatttcaaagatcaacacgccgagcgcgtaccagtcgacgctcttgttgtaacctttactctgtacgacctcgggagccactacaatgaaagccgtgctgatcatcagttttcatgcgaatcgatgactttgcctggcgactgacgataatcgggagttccacacaacgtccacgtgatatccggtacgtgcttggcgaaaccgaaatcggtgaccttgatatgcccatcggctccgagcaacaagttttccggtttgagatcccggtagatgatgttcagggaatgtagatagtcgagcgcgagagcgacttcggccgcgtaaaacttggctaccgagttggggaaacgctagcggggacgaggccacgtcgtttcagccggggcagaggggtatcaccttgttgcgagctcggcgcggctcacctgactctttcgtagcaagctgaaaagttcaccaccggccacgaaatccatgaccatgtacagattgttgacgtcgtggaacgtgccccagaggttgaccaagaaggggtgtctcacgcggacgagcatctccctctccgagtttgtatgctcgacctgtttcatccggacgaccttttccttgttgagcaccttgatcgcgtagaatcgaccgttgtgtttggaccggacgaggtgaacccgaccgaaagatccggttcctagtctgtcccatcgtaatacgtttccccggcccaacatcgatgatgagcccactttctaaagggggcgccaagggactgcgacaggacgatagactcacgtccgttcgatttggaaatccgccaacgcatacctccccgccgtcttcctcgctgtggctttcgccgtggccgtaggcgtggtcatccccgtcgtcgtccctcctgcagcgacggtgacctgctcaaaggccgcttgagtggccacggcgttgatcgtcgcgacccgtgcttgttgtgcggcgtactgcaatgcctgttgagcttggaccgcctgtctcaccgcccgaaccgtccatacgaagaggaaaaaaaaagagtcgaccggttatcatatcagcgctgggggttcgggtcgacgaaggggaatcctgaccggtcgagactcgcctgttcctgcgcctccctgaccttgtccttcaacctctcttcctcggcactaggctgtctccccattccctggggtacgggactctgtaccctccctgcaccgccattcgaatccgtcccgtcttcttgggggtccgactcgcctgggtacgtcgtcgttgctgtcgtcgctgtcgagccgggtacgacgggcgaggacaagctcaacccgctcacgtccatcatctcgaccgacatggcgcgctgatcgttggttttcgactgttgcatgtggtgagggatgtacggttgggatgacgagcccggagtggtcgtcgtcgatgcggattgctgctgttgctgcgacggcgcttgagtgtggtacgaaggaggttgttggctgggaagcgtggtatagctttgagccgggtacgtcgactgtgggctctcgaggttgatgatcgggaccccaccgatcgctatcgagggtacgtccgtcatctcgtctccggcctgatcctggatgatgggctcgttgtcgtgtccgtaatcgtggtggtggtgataagaacgagcggatgcagggggtgacggtcgtttaggttgttggtaagatcctagatggtgcgcccggttgcagacgatcgccgagtgacgagtgacgacgacgagtagtgacgacgagtcaatcccgaccgttgctagcaccacggtacacacctgaatcactcaccactcgactgctgagcctggatcccaggtcgagcttggcccgaattcgagcccgatctacaacgcagggttagaccgtacgaacaaatcgacccgggtcaacatcaatcaccgatcgaaccgccggggaggtcgaatcgaatcgacccttctctccgtctctcctttgtgaccactcactgttgatgcccagccggtgcgttaccgctaccgctgttaccgttgttatggctattgtggctcccactcgcgatcccggtagcccgtgcgatgttggcgccaaacgaccgttgttgcgtcaaaggtggagctgtaggttgctgctgctgctgctgctgctgctgttgatgctgagagctcgaagtcttgtctcgttggaatttggacaagaacgaactgggcatggttggtagcttggtagcaaacgggggaggggtctttcggtgtggtccggagtgtacgtcccaaccccaacctcgacgacgaccacgactccgacaccgcctcacaccttggccaagaacggatgcgccaacagctcgttcgccgtcggtcgtcgttcatgatcgatcatgaacgagatatccaggaaatcacccgcttcgctggaaatgtcgctcgggttggtcggtctcgccgccgtcccgatctgtaccgatgtgcccgaagtcgccgaaccgagttcgtagcgtcagtctttgtattcagtttcatcaacccccccccatacggccctacgacccgccttgactcacccggaagatggcctgcatctgagtcaaattcggccaaggatgttcccccgtcagcatctcgacgacgagacacccgacgctccagatgtcggcctttttcgtataagtcgtctgtttgaccacttcgggggccatccagaagactgaaccttggagggaagcccggttgagacgcatagtggacaagaggtctgagggagggggggaaatggtagtgttcagacgaggcggcctcattctcgactggactcgacgtgctccactcgcccgactcactgttttcgacctttttggaaatcccgaaatcggaaatcttgaccccgcccttgttatccaccaaaatattggctcccttgatatcccgatggatgatgttgcgctcgtgcaggtaatccaaccccgtcaggatttgcctgacgaaattcttgacgagggcttcttcaaacgcgccgtaattgttcagtagcgcggtgacggatccgccggggacgtattcgaggaaaatgttcaagtgggactggtccgtcgatgaatctgtttgcgagggaatccgacatgtcacggtcaaaaaagggattggacgttttttcggcgcgcaatcggacgctagactgaccgagatactgtacgatattctcgtgttgcaagtctttcaacaaggcgatctcctgctgcatcgcggtcaccatgctctgtttcctctcttcactccccgcaccgctcgtctcgagatcgacctgcttgacggccatgagcagaccggcttgcgaatccatcgcgaggtagactttgccaaacgatccctgaccaattagggcgccacggatccacttgatcgatcggttcgctagggtgtgcggatgaaagggagggttagtcagggtcaacaagtgggcgcgacaactcttttgcgcatcgcggagactcacttccggtagacgtcacagccttgccatgctgatcgtcttcctcctcctcctcctcctcctcctcctcctcttcgtcatcatcctcctcgctctcctcctcgtcagaagtctcatcctcggactctcccaaagcttcctctttcgaatcttcaccttgctcctcgggaaccagccctggactataggccttgctcagacgaatattctcgggagctaaaaagttgtcctcctcggcctcttcctcggattcggcaaacgtgatcacgctcgcccgtcggttctcgacctcggccgtgatctcgtcgacggtcaacatgcttgccgcgtccgaaaccctgcgactctttcggcgactcgagacggtgctcaaccgcctgcttcccatcgaatgcatcgagcttcgtcgatcttgcatgatggaaccgggtcgaggtctcgattcaaagctgggcatcgagtccgagagcgagtcttcggatggctggaagggaggtaacaggggcgcctcgccggccggcgtcagagcctcgttgtcatcgaaagcaggcctgagctcttgtccgtcgtctcctgaaacagagacgcgtggcaccccgctcgcttcgactcgctcctccgggactgcatcggcaggcgcgatcgatgcgttcttgtagctagacgcccggctcatccggtgagaactactgttcgaactcgtaacgctaaacctcgacggcagtcgattcgcatcgagactgtgccgcgtcgagtcgatgctattccgcaagttgtccagctctcccttgctcccgagacgcaacatgctattcctcgcgcccttttccagatctcttctcttggccgccggaaagtactcggccaaatgactcgagatgagttcgcttggaggtctgtgaccgaaaaagttgtacatcctgcgacctcgactggccaggaacgacccagaggatggggatttgggaagcggggcttggggcactgccaccggcttgggcgtggtgtcggacactggcactccgagcgccgacatgacactgatggtactggctcggtgcgtctgattcccacctcgcgtcgagctggccgtgcgcggcgaatctcgggtacgagaggtagccatcgaataggtaggagacgtgggcgaaagagctgctgcgggtggggtgtctccaaagatcgcgccgatatccttgcggttcggcaagatcctcatctgtttcagatacagtccgttctctcgggcaggatcggtgggtggagcgtaacagactgccagcagttccgcctccgtcaacgcggcagctgtgagacatggcgattcagtcaaaccaggatagggagatgtcaaacccgacgccgctcacaatcgtcattcctttgcaaaaagacgccccaaccatcgacgtcgagacaactgctctcatcggtttcagactcgctctcgctcaagcctgtcgctccgccacgagcgagtcctctccactttccaaacttgcgcaaagccttttcgagcacttcgaacccgttctgacaagcctcgacgtcgatcgttctggacgtctcatcctcggccaggatgaatttgaccagtttccgcttgacatcctcgagcgacaaggtaggtgtgctggacttttcaaacgcccagcgatctgaccaactgcgttggcccttgacgtgaacgtactcgtcgtttggactccgggatggcgaattgtaccacttgcgattttcgctcgaggcggggtaggtcggagtgatatccccttggccctcggaagtccctcgtccggtatcgaatctcgtctttgttggcgaacctgatatctttgtcgggctgtgaccccgaatcgaacgaggagccgaggcggcatagggatggacgttactcccggaatcggtgctcggcctctttgacccggctcgtcttggatcggacgtggccatcatcgagagactcctgggtcccgatgtctgagaggtcggtacggtactggctcctcttcgatgtgtcattgccgctgggattccgagagctccactagacgtggccgggcgaccgtccgagcctccagagcgggtcgaaccgaatgacccgccgctcggcctggacgaaccgctaccagcggatgattttctggcgaaatcttccgatcggtcttggtaaacaccatctcccgagcgagcgttcgaggtgtcgtctgaaggcagtccaggcagaggtctcgccatgtattcgttcgacccccttcgagcgatagggaccggattactcgacgaagctccggggaggggactcggaacgcgtctaggatgggtggacgagccaggagaactcccgtaattgttcaagttggacatgggggctcgaagtttcccgtgtgcatcttggggtccgggcacgttgcttcctcctccactgatccctgccggataagcgtgagctcggttcttcaggcttgaactcctcgctagcgaaccggccgtcctgggcgggttgagcgaatcgaccgaagagcctgatcccggttgtaaacccgtcgacaggtggacgttggtacccacgttggacccactcgatcctggcccattttggtccaatgtcccagcaggcatttctcgaggagtagtcgccgtcgagctggggccattagcatatgggtccgcccgcaagttgccatcgctcataccaggctgattcgggggatggctcgggacgcttatctgcccatgcgagctggaatgcaagtgtagcgggggcggacgggtcgcgtggagtcttctcaacgaacctcctgtcccgctccgacttcgagacaagcccgtcgctcccgtttcgttctgatggtcttgtaacgacttggcaggatcattcggtggccgtgtggggtgttcggaatgttccccctgtgtcgtcctgtgcatcctcgactctatcgaaatccccagacctaattgttcgcgacctcttccgatgtccacgctctctgaacccatctttcgcaatgtagaaggggtcctttggtgtcccccttgctgttgagcctgtacgctggcgaaactactcgcactcgccggtgtactccctccattactgctatcccttcccgtacccgtattgagcctagacaaggacgtcgtattcctctttttcagttcccgtatcgcccccaacaagcggaccctctctccgactttggaaacgccgagttccttgagctcttcagctccgagttcgaggatgacgctccctgtgatatcgttgtctttgaactttgtggaatgatgtccgcagcgttgcaggtgtaagaacgagtctacctctcggctagaccaggttgccagatggatatgaaaggggacgttggatgggggcctgtaaaggggtggcgtggatggacgttgcattatgggcgtatagcgagagccgagctggtcgttctcgtcgttgtgatcgttataagattgtctgcaatttctttctcaagtttcttgcctagtattgttcttactatcctggtcgcatcgacttgcattgatcgcccttagggtgtcctagctgtccataacccgagctacgaatatacctctggaggtagcggtatgaaccagcaattggcgttgacaattcggtgtatgccccaagctagatgtttctgctcgacgggaatgagattccgtcctagccgtgataacgtgacaactctcgatatctcctcgactattcaggttctggattcatcggagaagaagaagaaggggtacgattcgaatgtcacttctacttgaccttgtcaagagaacaaagagaaacctcgagctcggtcaattcacaaggggaaccgggatcaaaatttacttccgatccacacatacacacatgtcgtcactcggcggctcggaaatgatgatatatccgtcgtgaaaatagtgtcatgacaagggggcaccggagggcggggtttacacaagcaaggaaacgtcgtcgtggcagccacagtagagaggaggcgagagtttgttggagaaggaggaggaggggatgtgtgatctcgtttcgatcttgattcacgtgtggtgttttttctttcttcttcgtggaacggggttcgtcctctaaatctattggggtccgggaccgtcgctcttcagcctgcccaatcgcgaggcatagttcgggctcagctctgagaatcgtgtttcgacgtagcactcccgtgactcacgacgatcggcctgctcgcagaatctcatcagtgttgagcaagttggtagcgatgacggcgctacagagagagggatgccaaaccgatcgtcagcaaaccatcacattgtctaacccgccatactttctacgcccactcaccatccatgcatcatctgcctcttgaccctgtaattgtcccagacaccctcgaccgtaggatcaaacggttccccgctcttcaagtgcaacccgacgacgtgaccctcctcggcctcttcctgcagggcgacgatcgagtcctggacgtcgaacccaccgttggcggcgagcgtcttcgggatgatcaacaaggcctcggcgaaagctgccactccgagcttttgacgacccttggcttgaggcttggccttttcgttcaggtactgcgcgcaggcgacctcgaacgcgccggcaccggggatgagggattcgtcttcgatggcgttcttgaccgatcggagaccgtccctgatggcatccgtaatttgagcgatggtgtgcccgttgggacctgagaacgcgtcgtattgatcagtacgccgacggcgatctcgaaaaaactttcatcctcagaggaagacgatctcgacctgaactgacccttgaccagcaacgtgacactcttaggttccttgaccttttccacaaacgtgtacttttcctcgccgagcgtgtgctcgtacaccagacctgcgtaacccaagatgtccgggctcaagtcgtccaccgagttttgagcgacacctccacaagcgtattgcagcctgatttcatgcgtgcgacgttacgtccggggggtcgagtgagctttccccatccgtcacatcgacctcggccacattggggcgcgcatcgggacgtacctctccatgttcctcctctttgctcgcctcagtgccaagatgccgttcttggccaagacgtccaagctcatcgggtcgatacccttctggttgatgaggacgaaccccctcttttgcgacccatccgagggttgtccgtccgtgccgagcgcttgatcacacacctcgttcttcagggcgacgatctttcggagccgatcgtcgatgaatttccgctcggattccacgagcttttcccgctgttccgccgtcgagtagaagaatcccgagttgacctcgctgagatcgattccccagagccaacgacgagtcaatcgtcaacgcggcccatgacgagtaggggggaggtcgacaccactcacgtcttttcatactccaacgacacgttcatcgtgagtacaaacgcgttctccacctttttcggcatatccgcgtgccgggcgccatgatcgagcactagaccccggatcaaggtgctatccgtgtccgtcttgtgcatcatcttcatgatctctaccatgtggaggtcgatgggttcgcgaaaggcgtcgacacccttggcgtcggcgctcgggggaggagcttggatggcgagtacggcgtcgacgatcgaggtggcgagcgaggtagcgagggcggggtggagtttggtggagagcgaggtatgggcgacggagatcagggtggaacggtcgatctcgctggtgaccttgaattcgtccagaaactggacgtcgtcgttgtcgtcgtcgaggagttgtatcatgtcagacgtcggaatctttcacgaaccatctcgactcgcacggggctcaccttcaacgcctccttcttggcgatatcgaaaccctcaccgatgaccctcggatgcactccctccgagatgtacctatcggcctgtttcaagagttcaccgacgaggaggacgaccgaggtggtcccatccccacactgctcgtcctgggcgaccgccgtccgtgcgatcatcgccgccgtagggttctggatctgcatctcggacaagaggaccttgccgtcctatcacgcgggagaacggtccgggcggtggtgagtctggtagggcaggatggatgagatgccgctctccgctctcaccttggtcatcttgatcccaccggccccgtcgaccaacatcttgatggtacccctaggacctgtaacaacgcacacaccaacaccgaactcgacttttatcaatcacctcggctcgaaaggagcctctgattcgactcgcccggggggtccacgtaccgaggttactcttgacgacgttggctagacccatggcgcccatggtattgacctgaagcgcctgtgtccgcctaacgctctcggcctttgggttgatgagttcgatcgaggatgacattgtggctacgtttacactagattgactaggttgtgctagtagagtcgggtgtgtagggtctttgaatgtacgatatgatgatgatgatggcgatgatgaatgtgtgacctgggggggttgaacccgagccaacctgcgcgaaaacaagccaacaagtgacaagttgaatgtcgaaaatggaagcgcgcgcagggaaaagtagcgtgcaaggtgagaccgtgaaaatgacattgattttggacgtgaattacatcgcagtcaagagtcgtagaaacgagctaatacttggaggtgaatcagcatggtctctgtattgtattgatataactctatttcgactttgtatgttgtttgacaccgtgatacatgttccaagtgacgctacattcccatgacgtccccctttgaatgactctgtcgattctttaggcgcgtcaacgtaaacgacattcgctgagccaagacgacgacgacgacgaggacgaggagatgcagccagccagctaagctagctattcactcgacctctttcacccgtctatcttgcaaggtcattatcacgccttcccataccaccaccatcatcatctcatcccgtcatctcgagatcgaacctgttgaatagacgatacacatccccttggtttccccctcccctctctcccccctctctctctcttcctcccgtctcgccgaactcgatccatgttcgcgcagcaacatcatcgaggcacacccacgccagatggtggtcaacaacagcgggcaaacgatatactcaagcagcagcaacagcagcagcaacagcaaaacaacggctcgggattaggtgggaacggtatcccctggcctcaacagcatcaacatcatcagctccgggatgcgctaggtagtggtagtgcaggatcgggaatgtcggcactcgcccagacgaacgggacacagaacggaggagcatacgggagtggtgggggtatgcaagcgttcggttcggggaacaaggggtctgcggggaacaatggagggaataatgggtttgcccatcaaggcttctttagccataatcagcagcagcagcagcagcaacagcagcagcagcaacagcagcagcagcaacagcagcagcaatcccagcaacaacagcaacagcagcagcaacaggctcctcctcagcagcagacacatcatcagcaacaaccccctcatcagcgtatgcagcaacaagactggcaacagtcgtacgggggatcgaccgggaacgtcccttcgaaccaaaactcgacgccggggcaacctcacttgttgcccaacaacttggctgcccatttgaacaacccggggatgcctgttcaatcgtcgggtgccccgcaaatgtcgtcagggaacattcagtctcatatgcaacagcagcaacagcagcaggcgggtggaggtatcggtggggtcactggtgcgacggccgcgctctccgcacttcagctgagggaacagcaacagcagcagcaacaacaacactcggccaaactctccgccgcgctgctcgtcccgcaaggttcgcaatcgatgaacaatcccaacacctcgcctcaaccccatccgggttctttacagcctcatcaccccctgcccaacctctcgcatagcaacaacccctcgggtaacccttcgtcatcgggtaaactcctcctcctcccacccggacgagcgcctccccccgggtcagaagaatccaagatctacatcctcatcgccgaattgctcgatccccagacccgtgagaccgccttgctggaactgagcaagaagagagagatgtacgaggacctcgcgctcgtcctctggggcgggttcgggatcatgagttccttgttgctcgagatcgtctacgtctaccctgcgctcagcccgccgagcttgagcgcgcatgcgagtaatagggtgtgcaacgcgttggccttgttacagtgcgtggccagtcacgccgagacgaggagtttgttcttgaacggtgagttcggggatggggtttcgcgagagtcgtgcaaaggtggtggatgggcgctgatgctactcgtgttcgtcatcaaatgatagcgcatatcccgttgttcctctatccgttcttgaacacgacgagcaagacgagaccgttcgagtatctgcgactcacctcgctcggtgtcatcggagcattggtcaaggtgagtcaaggcgttctcagtaacaatgtgcatgacatttgggtctctaaacgcatgtccttctacacccgcgtcgatcgcagcaaaacgacaactcggacgtcatcaatttcctcttgtcgaccgagatcatccccctatgcctccgaatcatggagaccgggtccgaactgtccaagacggtcgccatctttatcgtacaaaagatcctgctcgacgacctgggtctcgcttacatctgtcagacgtacgagaggttctacgccgtcgggaccgtgctcagcaacatggtcaacgcgctcgtcgatacgcaggcggtcaggcttttgaaacacgtcgtcaggtgttacctcaggttgagcgataatccgaggtcagtacatagggtcctaccagtgtggaaacgttgcgagatatggggctgaccgaggaacgatgttcaaatgtttctagggcgagggaggcgttgagggcttgtctgcccgatgcgctgagggacggaacgtttgctactctgctcaaggtgagtcgcggtcggacgtcgaggtcgccgaacccccctgcttacccacatctcgattgtcagggcgacgccgtcaccaagcgatgtctcacgcaattgcttcaaaacctctcggagcgatccgaatagacgactagcatccaggagcaaacgtctgccgcccgtccggaaaagagaaacaagatcgccacacctagtccggtcgatatcgacccggtccatcacatacccccattcaaaccatctcgggacaatctcccgagaacgatctaatggataaacacgcacgcacgtacgcatatgaaatcgacacagccaaactaccacgcccctcccatcgccactcctcgctcttgttcttgtgcatcgcctaactggattcagtatcgttcccgcgatcacacgctggatctctttctctctcgccgtttcctctatcgacgcgacggatttaatcgaaccgggacctttcgagcgaaactagtcgcccgcttcgccttttcctttcaccgactcttatatttaacccggtccgcttccctctctcgtccctacgtacgcttgtaccgataattatcgcccttgggaacgtcctacgaggcagcctgtgcccattttctctccctgcctgtctgttggtctcttctacgtcatacttgtatcaagattggtaaagatctgaatcgaggcatccatcaccttgtcctgccatttagtagtattgtcatttcatgcataggtacaacgggttcgatgcggacgagtcggagttccggccgtgatgatatacacgcagtggatgcccctctaatatcgaccgctttagagttcgtcgtgagtaggtccgtggtagcccttgagcacgctatccctaacggccttggggtcgacatcgtcccagctataccacgagcaagagtgagaacgacgtctcgtttcacgccttcagtccccccccttacgaaactcactgcgggaaagtcatgggcaagctcttctgatcgtccgggtcgagacccttaaagtccctcttgatgacctcgagacaagcgtcaaagacgaccttgtacccctcggaagtcatgtgcaatccgtccgtaaaaaaccttctcaacgactcttcatccttttcgtccccacccgcggcggtgacgagcaagtcccaggtatcgatcacccggagcttcgtagcgatctccgggtcggtgcgtcggaactcttgaccgatcttgataatctcgtctcggtaccgcttggtgttctccaacgaacggtccgctggggtacgttcctcgggagggtagacgagtttggcttcttcccgcatcttttccacgatcggggctggggtcaagaggaggacgtaggcgtgcggttggtagtactctgacgagggggagaggagggaccggacgtagtgtttcatgttttcggaatacttttccaacggcaagtgttgatgcctctcgggaaaggtcgagtcgtttgcgcctggaagggtggggtaagagggggacgttcaatatcgtctcatcgggcatgtggtcggatgccggatcgacttgcctagccacaaggtgaccagtcggacggcagggtaacccttctgctcgtccttcttggcgaaggctcgttcaaagatcggaaggttcctgtatcatccacaaacgcagcgcggaaaagaggtcagaccccggtgcgtttcgacgacatgtatatgcgttgatgacgaaccattcggaagtgtaacctggtcgacgacaaaaacgggtcggatcagctccgaggaaagctcgcaaagtgcactgtgacgacgacgagcgctcacctccgaatcctcggttgaggacatcgagtcgtcgtgagtacgccgctatcacgaccagaatgacaagttaacggttgtctccgtgttagcttggtgattcggagacttgccggtgaaacggtgtgccagcgagccggcagcccattcttgggtgatagagtctccctgtcgcgtggggccagcaagacaaaatgatgagcaaacgcaagaggtgtagctcgcaatgggatggctcacaaagaggacgatggcgtcttggaacgtcttggccatgatcaaaggcaaaagacaggcgagtgcgaagaggttgagtagggcgtgtattgtaaggagatgactcgttgtgacggttcgaggaggtgatggtcctgttcgagtgtcggcaatggatttacaaaggccacttgtatgtctgtgtagaggtctgataactgttagtctttcttgtctttgtagttgcaaggtcgagtcaggtcgatgaccgatacatgaaatggtgtgctagttgatggtgtgtgtagtggtgtaacaatagcccgcgcagcccggagtatccccggcggggaacatgcttactctagctatgctaagacggaccccccgaagtcgacaatcatatatgactcaatcgacctcaggatgaccagaccttgacattatattcacgatcttcggatacctcctgagtctgagctggcaactgcctgagaacggatgtgtggatgtcgcaacgacatctaccccaaagtcgacgacttgcacagattcgctcgaagcgcaaaactcatgtcaagcgcgcccgagattagagagaaccgagatatgagcaagtgtgttcgaacgtttcggaaagtcgaccgatagcttcaagtcgtgtacagcccggatcattggtacgagtgacctgcacgaccctcgatagcatcttgatacccattgacccagtcgaccgtgagaaactgtttcccaaaatgtcttccaacgaatcagccctcgagccgtacaaggtcgaattcatcgaaaaggccatggagagcaaggtcctgctctttggcgactttacattgaagagcggaaggtgggcgccttgtcggaccggcttacatcagagaaaaccgccctgacgctccctcctggctcctaccggccttcccccccccccatctctcgctccatctctcgctctcgctttccggctctgacgtgcccacagacaatctccctactttttcaacgccgggctactctactctggttccctcatctcccgagctgcgtcgtcctttgcatcgaccatcgtatccggcaagatccccgactttgacgtcctcctcggacccgcttacaagggaatctcgttggccgcggtcacgaccatgaccctgtacgacaagcatgggatcgacaaggcgtactgttacaaccggaaagagaagaaggacgtgagtctgcgtcaaaagtggcgaggccggtgaggatagcgtcaggcaaggttgtctaattgtcaggatcgaacttccttttcgtttcgtttcctttctggttagcatggcgagggaggtgatctcgtaggagcccctctcaaaggtcgagtagtcatcatcgacgacgtcctcacatcaggggtaagtcccgtgtccgtccgatcccctccgtctgcactaaccaactcaagcttcgtcctcgctgacttcctcccgtcgacgctcatagaaagctatccgggaagccatcgccatcctcgccaaccacccggaagccaagctggtcgggatcctgcaactcgtcgaccgacaagaacgcggtcagaacagccaactctcgaccgtgcaagaggtcgaaaaggaattcggcgtgcccgtcgtacccatcattgcgctcaatgacattatgcgatacatggacggcaaggacgaactcaaggataatttggagaggatgaaggcttatcgaaaggcctgggccgtagaggcttgaggcgagggagcgtgaggacaagcgagattgtcgaattgcgatgttcgtgtgtgtacggatgtgtgcatgtgtagagtgtgtgcgtgtgcaagtgcgagtgtagtgaatacaaacaagataatacaattccgtgcatatgcatcgtttttccaactgtttcgtggtgactttgttttttctctccgatttccgttttctttgttgagccttgaacctgagccctgagcctttagcctgtagacgtgatgtctcgttgtgaactgatcctgtgtggtcacaacagggaaggaaaaaggctggcagcgccgtgatgatgaaggattgaaggatctgccgatccgggtcgagatgctctggcatggtcggttccctcttgcgctcggctcggcagcgtcgttgtaagcggtatgtgtgattgtgtcgtagatgcaatgtggttgggggtcgtgacggaatgataaaggtgatgatgggttggctggcaataccggcttctgacagggcgcgctcttcatagctactccttgcctcgcccggtcttgagaccagaaagcattttgccgagtgaagcgatctgctgcttcagcttggcaggcgagcccggggtgcccgatgaatccgacttgttggctgggactgcaagtcgtgattccgaatctccatggaccggaagtaccatggaaccagcactgtcattgcgctggacgatcggcttttcgctgatactttcgagaaaaggccgattgctcctagtggacgacttgttcttgggcaacggaggcctaaaatgaatgactcgacgtcagaacaggtcgtgggtaaacttgacgaaggaaagaccactactcaccttggagctaaatgggcttccgggctgtatggcccgtcgtccacctgaactccgctcttggcggacgaaatctgggtcgatggcttattggggttgcgattaccattctgcagtcccccaccaagcacagatttattcggcgtgatggtacttggcctgtcccgcatcgaacgtgaacggaaagatcagcacacgataaaggcgccgaacggtcacagtctactgacgagttgtagcctgtgtattgagacaagggcaggctgtatgtttgcacagatccgactggagaggtgttctgcgaccagcccagagtcggcaccggcgacatttcacggccgtcgaagcgcttggcacgggtctgactgctgtcgaggcgtcgtggcctgccattcgtcaaaacattacggccacgctcgtcctcttgttgagcgaatgttcctttgtcgagtccaccgtcaaacacaatgggacccggaggtcgtctccagttatcgctctccaaaccgcaaggcaagctttgcgtaggattaaacgtcgatactgcgctggttggtgacaagctcaagaccggggtggctgtgttggtgtcatcacctgatgtcatgctagacatggatcggccgtgagcgacgtgttgcagtttggcaggggcgcttcggtaagccgaggaaccgccgtcgcgctcctgaatcttctttaccaaggcctgcaattcgggattcccatgcgacttcgacatcagcgctttccacctggactgcttgagttcgcccggcttgacatcctcgcctagcttgggaaactcgtcgagatcgatgactgatccctccgccgacttggtagcctttgacagctgtctcgccagagtctgcgaagcctctgcgaggtcggcgagaacggcctccttctcggtatgtgcggtggctagtggatcgggcgtatgagactcgggcatccctgccatgagagcggcagcagcagccgaggcggccttgttcttgcttcgggtaccccgctttttccgcttggctgagaccggtcgagacgttccatcgtcgacgccgttcggagtacccgcttccgggttcgtgtctacctgtgcaatcgtagacgacccgtcgtcgaccggtgaggagatttcttggacgctgtacaacagcgcagtctcggacggcaccagcggagtagccaaggactgacggtcgacgatgacgttcggcggctgcgtagccattggtgagaatccactgaagagggtcgtcgatttgggctgcgacacggacatgcctcgcgggtcgatgggactcttcttgaactcgagaggtccgcggtctttgacgccgccgccgttgaggtacgacatccgaagcgcactgacagcctttttgcctccgatcatgctgggcaaatgacgagcccaccggccaaagtcccgagctgacgtgcgttgatccgtgtacacgttgaagactcgttcggcaaggtaagcagcgacctctcggccgatacccgtgaaacgagagagtaggaattcgactggatcgtcgaggaagccatcaaagttcttgttgcctggtaccgggtccgtccatgggtttcgatgaaaaagcatgttgagcagtaccaccccgagtgaccaaacatcagcaggtcggggttcgtagctgggtccaagctcgtttcgacattctgcaggtttacgtagggtcgaagcgatcagcaaggaaggcgctcggagacaccaaaagaccaaatcccctcaccatatgccatgtacggtcgacttccgcattccacatctccgctggtctcgtcagtggtcgcaagaccgaaatctgtcagcttgacaatgactttcttgcgtccgagaccagcgtagtcgtcgccgtcacgtgcagaagccaattcatcggaatcgcagcagatgaaattttccggcttgatatcgcggtgactaacgccgatgtcgtgacaaagggcgacggcttcacacatttgagcaaacatggatgcaatcagcttgagtcgccgagcagatagcaaagcatttgcggagtaggcggaaaggaggcttggcgtagtaggcgtcgctgcatgaccattggacgactgatgatgcaggtgactgtagggcgagtgcatctcgtgaccaacatgactgcgatgcgagaatgcaaccggtgagtgaccgagcccaccgtggggcgttcccattccagagatcatggcactggtggaaaatggtactgccgaggaaggtaggttactcgatgacaatgggatgtttctagcgtgtgggtgggcttcaggtgattcgttgcgcagatcgggatgatggttctcggtagtgcttggtggaggcgaatctcgcgagtgctcaagccaataaaagctagccaagtcctcatggtaagcgcgaggcactgccgatagatcctctgggcggtatgacttacaggtcctcgccagggcacatctccagtagcaagaacagccatttcttggtctggagagtttgatacaacgtgacgatgttctggtgtcgaggtagagacatgtgtattgttgcctagttgagatggagaggcggtctcagagaatggttccgcaagacgctgtcactgggctgcgtactcacctcgaatagctgaacgtgcaaagcatcaccttccagatccctcttggagagacatttgagcgcttaaatgtcggggtccaaaatcagcccatgtcgcgtgtgaccgtgatatgccctactgaccgaattcttgcccgccgcccacgtctttcacgagatacaccgtcgcatagcttcctgatcctagctttcgtactacctcgaaaattcgccttttagccctttcttcctggtccagcccgttttctcgcagcgaagcgatggaaccggcgctggactgcggcaggctacggccgttctctttgctcctcgcgaccgggtctacatcctcgatgacttctccctggaaagccaatccttcgccaattctgtaacccggaggaaatatgtcgtcatcgtcatgttcccgatcgtcccacccggtctggtcccccaattccattccctgaacctcgacctgcagcccggtcgtatcgtccgagcccgaatccttgtaaagctgatccggtcctcctcgagaagactgtctcctagcaacagtatagtcgtcgtcatcatcctcgaaagcctcgtcccatccgaaatcggcgaactcgatatcgtctccatcgcccttgtcccatttaccgtgcttcttgtgcgtgttcttggtaggcaaattctcgtccacttggccgagcaaggccgtcatcgaattcccgccaatttcccggctcatgcgcctcgagggagacgttggcggactgccgaccttttgaacgggcgttctcgatctagacctcgatgcgagtgaaaccgacacggcgagagccaccgaagaccgtctcgaccggttcaaccccggatgctgaggatactgttggcctacttgatggccgtcggcgatgttggcgcggaggtactgttcggccgagacgaacgagacgttgttgctcagcaaccctggcgaggtcgtgcctgatcctattcccccgtgggaatctcctgggtagacgaaaccgttctgtacaaaggccgacatgcccttggaaaagctgggcaagcgggacttttcgcccaggttcggacttcctaccaccgactgactggctgaagttacgttggaggcatgacccgagtgaatgggataccctaaaccgaaaggagcgaaatttgcttgaatctgagcatgggcgagtttcgggctcggtttaggggaagcattggcggtgacgtaggaagtctgggtggtaggcgccagatgcctcaatacgggggaaggggaagcctcccccgagctagtactcggacgtttgtagtggtccatccgtgtatcgccagcgctgggtcaagatctcggttccccgtgggtgttcagtcgacgaatagcagccgccgatctggcttggcctggaagaccagccgaccactatcgccagacacaatccccgttcggaatcctataacaaagtgcgtgtgctaatatcccctctcccgaatgatacggccggtatcggcgtcgatgtcccgatgcgatgagaggacactttctgtccactcttgcgcaagaaatcggggacgagatgaggtcgaccagacctcggcgtcgcccttcctttctctctacgaccagctgatcctcgttacgtgtgcccgatctctctcgctcgtgctgctgcagccccaggctgttggtgcacgacgatgggcggatgacagcaactatctcgacgttctggtactcttcctcgttctcacgatgcgatgcaggagtagccgccaagcctcctggggggattctttttcgatgagagtgaggtgaaagttggaaccccttactccggcgtgtcgagagactcttgagaaacgatctgtgacgtggatgacgctgcccaaccgccgaatacggggagaagcctgagagcctcctttttcctctcaaaacgtggtcggtccgcctggacacgagctgcgagtaggaaatccgcagcggtggtgggcttgctttccggtaaagggaagggggacgtgaccctcctttgaaaccctgaccccgtgcgttaaaatcaagcctctctggacgaggatggcgtgactggggaccttgagtctacaagtaccaggtctgaagaccgagcctgtgcaagggggacagttgcaaaggagtccagcacaagagatggggagtgtgatcgcggtcgagtcggtcgatgtcgaggtgttggtgatgccgtcacagttcgagaaagggagcgaaatttgggagagacgaagatgcaggtagatggcggcggcggcggtggtactagtaataatcgaacgggtagatggtatctgtctatctcgatggattccggtgtaagtcgagcgtttcaatcgattcgaaacatggtcgaatcggttgggttgaggtgtgaaaagtgtggtagtcgatgatgggttagggttccaggcgagacggtacaagtaggatccggaatcgaggttcaggttggttgtcgaacgtcgaccaagttgaacgggttgaatccgattgtttattcgatgagaaaatgatatatcgatcgatcaccccatttcaatccgaggacgacgaggggatcatcgaaacccccacaccgatgtcgtgcaggtggatcgtgttcggcatgggacgagtccgagttcgaggtcgttcgaacgtcggaaagtgatatggcacagcgccgggagccggaagtgcgattgcagtaaacgttcgggcgagagcgagtggccgagggatgtgccgcggataaaaggttcaaaggggtattcaacggtcgaccgacggttttcgggtcgagatggaagtgccgggggtagaatggaagagaggacgatatgtcagcgttattgttctgcggcgggtcgaaatgtgggtagatccgaggctgacctggtggaatgcggaacgagagcgagggttggttggagcggagaaggaatgggagagagagacggggaggtagagagaagaggaaagagagaggaagaggtaggaagccggtaaaagaagagccgaggtgaagttgtcgttacgttctgtatattcgcaggctgtgtcgataggtcgtcaacggttccgtggacgagtaggtcgatttcgaggtggatgaccctcgtcgtttactttgggtgattgcgggggttgcatgaggtcgggtcgggtctttggagagttggcgtgatccacagcatgagcagcttcctcgcgtatcaagatgccggcatctcacactgttctaacgccaggccctctggcgtcctggcccccctgccgccttcttgcccgaaggggaaggggaggggcctaacgcgtcatcggcgtctttgatgttgtaaaacgtcatcgggtcggttctttttatggaatctgacgtttttttggtaggaagtacagtcagagaatcaaatgatcaagatgtgtgtcgccgttgtaatggctgcgagaatcgaggtcaaggatgtactcgttgatactcgcgagagcgagaggcaagaaacggtggtgatgatcgcaggtgtgcatgagtggcccgagtgcggcggccatagctgggcgggggggtctgggtcggttccgtttctctcctgccgcccttccacctcttccccccctcttcggtgattgcctgcgtaatcataatctcttcacggccatcatcaaccctttgcgtatgcgaaacgctattgccagagtgtcacgccatgccaaggacctcaccttccgctcgtctagctcgtctcgttccgagctagtcgccagtcgccagtcgccagtcgccagtcgacgtcatcatccacaacacccattgcatcatcatcgtcgtcgtaccgggtttgtaacgtcgagttgctagttgcgttttactcgcagtcgtcatcaaatctttcatcgcctcacacacacccttcatctgtcggtcgaccttgatcaattcactatctatctatctatctatctctctgtcaaatatctgccctccctctcttcacgttatcatcgcccctctcaacccgaacgatacctctctcgaagagatcaaccgtaataaccactctgtcaacaacctaccctacacctctcttgatacccatcatctcgtaacccagctcgccgttccccctttcccccttcctacccttactcgacggcaagaccgaccgaccgacggacggacccggaccccgtcatcatgcctctcaaagacgcactcaaatccatcaaggccaagttgggatccaacagctccaacggatcagatacccatgctaccggatccccagctacggccagtggtgcccagactcccaaatcaggtccgggctctcctcgagtctctgggcaacatgacagggtggacagtcgacgcacctcgttgtccaaggaacaacacgggtcgacgactcacccttcatcgacatcgaggacaaaaagcccagggccagtggatactttcctagggaaagctaaatccctgaaatcgtccgcaccgggatcttcactcgcccagccgaaatcgaccgaagcgtcgaaagggtccaaagttggcccttcgaaacactcggaaaaggtcaaacgacgtaaagcgagaaaggaacaacatcgcaaggaagtggccgaacgcatggagagcgagggactgggcgggaagaaggggaggatggcaaagagggcggatccggggagcaagtataggaacgagacgtttgggtattatcccctgatgaggagtgacccgaagcagaccgagagtgagtcgacgttgtcccacgattcgtctacatgcatacgaggttggaatcggagagctgatcgggattgaaccatcatgacagagtttgagtacaaggatatgagcgagctttccgagcaagatatcgggcaagaggtgaccgtccgagcgaggatcgatcatgttcgaccgcagagtgagtccagcgtcccttcttccgcacatttccgtcctggtgcagacagtcacactgacccggcgttggcgtcttgctcaggtgcgaaattggcctttatcgtattgaggtaccaaatggagcgcatgtcggcggtcatcaccctcgacgagagcgagaggaggaacactggcgtcaacggtcatgtcggtggttcccaaccgatggtcgccgggggcagtcggttcgtagaacaggatcaggtggtcttgattcccaacaccgctacgaacggcatcggcgcttcggtcctcgaggaagagacgtttcatacgccccagggagaggctttcgccgaccagcaactgcaacagccctcggaaggaggagtcgtcggattggcgcctcctctgcccgtcgcgatgtctgtacctgtcgtccaggaggccgccccggtacgagaaccggtcgaggtcgtcgtaccgcctaccatcgggggacaagactacgccggggaacacgcaggacagagggaagagctgggcgagaccggtgtcgctcagagggatcctcgacgcaaagatcgtcatcccgacgagctcgcctcggtcacctcggaagattcgagtagcgagggcgaggaggattcgaccgattatgataccgagtacgaccaggaacacgagggtggagtcgtcacggaagaattcatccgttggatcgaacatctccgtaaagagaccctggtacacattacggggacgttgcagaggcccaacaactcgacgggggagatcaaggaggcctcgctcaacttgagaaagctcgagttgaaggtcagcaaatgtttcgtcgtcggcagggtgtttgagcacgctccgttccagttcaacgagatcgagggtcaccacgtcgccaacgaagaggagaagaagacgggagctcatttggccagggagcaggaggagtcgggtctgggcaagatcagcgtcaggcaagagttgacaaataggacgtttgacctcagggtgagtgtcggcgcttcgccattgtcgagtgcgataccgggtggactgattcgccgtcgttcccaactcgtaggctcctaccaaccaagccatcttccggatcagggcttccgtttgcaagatcttcagggatcatctcgacgatcgcggtttcgtcgaaatccagacggccaagctgcaaggtagcgctaccgaaggaggcgccagcgtcttcaagctagactactttggacgaccggcttacctcgcccagagtccgcagttggtgagtctccgagtttcgttcgagatggatggtgggagaggagttgactgtggatacactcgacaggccaagcaacaggctatcattgctgacatgggccgggtgtacgagattggttcgatctgtgagtcgtcattccacaacagctcgacaacgccttgctcatacaccaccgcctttcgcccctagtccgtgctgaaaactcacaggacaagcgacacatgaccgagtttgtcggtctcgatctggaaatggcgatcgacaccgactatcacgagtgtatgcacgtcatcgacaccttgctcaaggccatcttcaagggtgtccaggagagaaaccgtaaagagctcgaggtcgtcaagcagcggttccctcatcaggacctggtcattccggacgagaccgtcatcctgcattacaaggacggcgtccaattgctccgagactcgggtcacaagcacgaggacggttccgagctcgcggatgacgaggactttgacacgccgacagagaagcgactcggagctctcgtcaaggaaaagtacaacaccgattactacatcctggacaagttccccaccgcagtcaggccgttctacactatgcccgatccgaccgattctaggtacagcaactcgtttgacatctttgtccgtggtcaagaaatcttgtctggtggacaacgtatccatgactcgactatgctcgagggtagaatgaaggaagccggcatggacccggaagtcttgggcgaatacacccacgctttccgtctcggagctcccccgcacgccggcggtggtgtcggtctcgacaggttgatcatgttgatgctccagctgggcaacattcgattcgcttccatgtacccgcgcgaccccaagtcgttccctgacagcggcaagccaccacccatgccccgacccaagatcggaaggcacggaacgttgcctaccctcgaagacctgatcgccgcctttggagattcgaccaacacgtcatgggtcgacccccgatataccatctggcgccatctcgagacgggagccgcgctgggttacgtcccggccaaacacaattatggtgtcatttggggacctcctctgtgtgcgcccgaagataccgaggacgtcattcaggcctggttggagcattgcgacgagatcaagctcaagcccatctggtgttgtctggacgagcacacggccgagatcctcgccaaacgttaccgatggaaggcgatcagctgtatcgccgagacccgggtggatcccacccattacctcggtgcggaagattcgaacgtcagcaagaagatccagggtgccaaaaaggccggcgtcaaggtgaccgagctggaagaggcccccggcgaagatttgaagaacgagctcgatcaccagatcgccgagtggtcttctcaccgggaaggaacgcagatgcacatctccgacgtttcgggtgacgccttgctgcgtgacgctgggcacaagcgattctttgtcgccaaggacgagcaccacaaggtgagtcagcggatcgtgtggattgtttgcttgcgatcacgctgacgacttgttgttcttttctgcttgaccgcccgcacagctcgtcgggatcgtcgtgcttgctcgactttcgccagcgcacggagagcagatcaagtggtcgttgcagttccccgacgcaccgaacgggacgtccgagtacatgctctcggaggccatgaagtcggcctcggaatcgggcgtaaagactttgacgtgagtggtcgagcgtgtatctccacaggcgaacacgtatacacatgctgaccttcgaccccgatcgacagtttcggagcttcggccgccgacaagatcgtgcccatgaaggaccagaagagtctgagtatcaaggtcctctcccgggcttacgaggggatcaagtcggcaggaaacttgggcaacaagacgaattaccgtcataaatggggcacgacggacgagccgctctatgtcgcctacccgaagcatggactgggaacccgagggtgagttgcaaccgcgcgggaagtcgccatgagatcgacgctgacgacgggtaatgcatcgtgctggacagtatccaagctatcatggaaaccgtcaccgatgaccatgagaaggaacccgatcatgcccatgatcagcgaaaccagcgcaaggtcaacgaggccgaagtatgattgtggtccgcttcatccgtcgctccggggtcgacttgagacctggacgttccgtttactttttataatcactcattccacgcacgcaaagcatatatacacttgggcgtttgcggattctcgtcatcaaacatgtatctaccactcgactccggctcgttcccttataatcactatacacagcatgctatcgattcgcgatggatgctttacctgattgtcgtcctggggtttgggtccgtggtcatcgcgaggtggaataaccggtcgggtcctgcctcttacggatatacgaaactctcgcgatcgatacacggttatcgcgttcgagtctcgacgtagggcgatcccgatctggccatcgcctgaatctcgagagtggtatatgcattgctgatagcctagatatatgtgagattctagcttgtactgagggcagatgtcgttatggaacgagtcgattagtgttcgacttgacttatccggttatatgatgatgggggatcgatctggttcggtctttgccgcgtggagcagtcgtcgacgtcgtcgtcgcgttcagccgagtggtagcaggtagcactacatatatagacaccatctactgacagtgactatagatctatagatgtatattgcccgcgacggtcttgcactcaagatcgacgatcaaagacctacaacctacttccggccattcgcgccgttgagatagcttgcaagtgccgagccagctcgtacgaaaggtccacctcgaacgcaccttcattcgccatgtccaagtcatccaccgatgggtacctctcaccccccgtggactcgctcaccaatgaatccgctcccaacgcttggccgggccatatcgaccggatcgccgtgggcttgatctacgccttgctcctcctcgtcatcctacccccggccgtcatcctctcggtcgcaaggttttacctctttggccctggtcatccggattgggacctcaagacgcaggtgatgaccaatgtcatgtactggttcatcctctttcttttcctcttcaaactccccgggagggataggggggaagacaagatcgccaagacgatgcggagaaaggggatgggcgtggaacagatggtcgtccccccctgcccggaaacgtcgaggattggatgggccaagcatgatcgcgtgaaacccgtccctcgaccaggattcatgatctggccggaaagggagacgaccaccgctgctgctggggccgcgtcgaacactactagggggaaagggttggaaaaggccaagaggggggaaaaggtcatcatctactttgtcggcggagggttcatcagcggacatcctttgctctcgcatctagcatggaccgtgagcgagaccctcgatacccgggtattctgtgagtgtcgtccctcgaccgaaagcgtgctactggacccgtaatcagtacccccgactgaccctcggctcctctccctccgccggcacgcactcgtcgtaacgcaggcgtcaactaccgtaaatccatctacccggacgccgctttccctggaaacctcctcgatgccctctccgggtacctctacctcgtcaacgagctcggtttcgaccctcatcacgtcgtcgccatgggggatagcgccggagggaacacggcgttggcgctcgctaggtatctgggcgagttgaaacgggacggaagcggggtcgggcaggtcggcgggttgatcttgttttcggtgagcgtcgtcgtcgtttcaccgtttacgcgtcttgagcgaatatgctcgtaggatcgagactgatcaggggtttggggtggggattgcgctcgggcagccttggtgtgatatgacggaccaaccggggacttcggcagagtttaacaagaaatacgtgagtcgacgatgacgatgatgatgctacgacacttgcgctccctctgaagttgacgtcgacgtcgacgtgtttgccctcgtaggactatgtctcgagcatgggcgtcaacgcgatcgcagcccacactcggcactatccgaaacacctccgctcgccctacttttccccggccctgcctagcccggacgggtcccccaggtttgctcatctcaccggcaaacagggcaacgacgaaaagaagaatggcaagggtaccaaggtctacgtccaggcggggacggccgagttgttgtgggaccaggccaagatgttgtgccgggggatgaaggaggaaggcgtcgatgtgacgttgcgcgaggtgagacgggacggcacatcatcgagcgattgctggtgcgggaagcgagaacggtgttgatgctgatacttgaccgaacatgatcttgcaatctcttccgtcatttcaggtccccggggatatccacgtgggcatcttgttcaacctggcgaaaccgctcaaggcgaccaaggaggatcttcccgagttctggaacggactcgattgaagtggtgcgaggttcgggtccgattgaaatgtgaccgagaagctttcggtgctcgtgtgtgtgcctgtcggtacggattgtagatcgatggccatgggagtatgacgatgatgtcaacgacagtggagtgtgtggtgtggtgtcgaggtcggcgattcccgcgggaggttttcttttggaaaaaacctccgagacggaggagaaacgtcacatcacatcacatcgatcacatcctgaccccgaccccgaccccgaccaccatcatcggatcatggttgctcgtgagatgggcatgtcaggtaatgatatccatataacaacaggcacccatcggtcgattcgagaagacgatacgacaaactcgtccgccgatctgagactcgcggcttgtgacttgcctgttatctggatcgacctacaatgtctcctcgaaatatcacacccagcgataccgtcgtcacgtaagcacctccttgtcgtccgacctcaaaccacgtaccaccacattgggctcacccggctcatcatcatcatcatcaccatcatgtagcgtctcgtcgacgtttgacaaagcctctaacaagaagaacctcttggatggcaacaacgagacgtgttggtcctcgcaacaagtaagcacaaggtcttccctcaaccccgggctggccctcgctcgacccgccccaacgctcacccgtctctccccgccttgcagggcctacctcaatggatctctctccgagtgaataaactcaccccgatcacccacgtcgccatcaccttccaaggcgggttctcggggacgacggcgggcgtctacttggcgagcgatcgaccgggaaaggctagcgaaggggtagacttgggcttggtattcggaggcaagatttatccaaaggattcgaacggcgtgagtcggcgctacgcccgagtcaagtcggagcaggtctgaacagagtgattcgagcgggagaactgatgatgatgatgatcgtcgttcttttacctcgtctcgacagcgtcaagtctttgcgtaagcccaccctctgagcatatcccccaccactcttctgcacgctgactctccgacattcactttcccaccagcctccccatccccgaagccctcccagacacgttccacgagaacggtatccatatcgacagcgagacctctcaagaatccaccgaaaaggactggatcaaggaggtcaagctcgaattcgaaaagagcgcggacccatggggcaggatcgtcatctactctgtggaactcttgacggattacgctggagagttttgatttcagaccaaggcggtcgtgcgtggctggatgggtgcgagatgtttctgacggggtgtacagcgagcgaggtgtatcatgatgaatatgcataatgcgatgaccggacatcttggggagctatgctaggggcacaaaagtcctgcaacccgaaagtctatgctagaggacgctgcatctaaaacgaaacgccaaaacagggtggataagaggtatggccatgccttttccaatgattgggatcgtgcctaatgttttcgagtcgaggaggaaaagcattgcggcaccgatgcatacccagggatcgatccggacaggctctgacgaatcgcaaactcgcccatcctcgacttgttgagccggtgactatcgttggtgcatgcaggctgtcttctcgtccggtccgacgatgagcctccctcccgccccgcgaacagagtagggaggatcgacccctacccctccggattgcagccaatagacgctcatcgacgtggatggaaccctgatccagcaaatcgatcctcatgacgaccaatccgcgctatcccttgtggacccgacgtgctgaccacttgcttgggggggggcaaggctggcacctttctcggatctgagcctgtagaggtcacggaattcccgatgaacattcgcgtatgatcccgaggtccggttcggcggacggtgttaccaatccgaacgctcagcccaagtgtctaattgcgctacaagggctaataggcgtgatccagatgaactcgatggcgaggctcaggctcaggctcgagaagaatgccaaggaagatgcatcccgcctcgcgctcgtgtatgcacgccggttatcggttgtaggcgagtacgtcgcagtggtgccgaatatgaaaaggagcaatggtgatgatcgtgcccatacatgacgtcgtggcgagttaatgcaatcggtttcgacccgtccatgaccgaagagagggagaaagagggggagcgaatctgtttttgcggatgtgtcgtggttgcgcaacccgtttcaggccgcttgatcgtattttgcgaggtttgtagtatgcagaggtagccatggccatcctcggaatgaacgccgaacgtcctgtcaagcgcgacgaaagtcatctgggtgaccgtgttccgagatgatgggtgtcgatgaaaaaagctgtgcgtgggctagtacacccaagccgatcttcgcgaaaagacacgcctcgtcccgcggcgtctccatgcaggaacaagtcgcactgcctactctcgatctcgatctcatgccttttgcccacccaaaggtccttgttgtccgatttccttctgcccatcccgaattccccaagctctaatcctcttccatgaacatcggtcgaccgcgtgtccgtccgcgttcgttgagcatgaccacgacgtccacctttttcctctctcccgttcccgatcgcatcgaggaggacgaacccgatgtatgggcgtgagcaggcgaggaggaggaggacgatgaggaagaggaagattcgtcctggttgacgaccttgtggaacccgccctcggtgggtctgacggggcaggggaaggcgacgacgaggaccgagccgaggaaggtggccgtgaagagcgtttggaggaatgatcggtgagaggggttgaagtaggttttgaggagaggaggcatagcgaatataggggttgatagtagtgagggagattgtccaggtagggtgtcgatcgagtagtagatgcgttttgttttccgatgcgggtcgggtcgtttgatgcgctgtttttgctgatcggtggcacgggtaaaagtacggatgagccgatgaactccgcctcggttcttccgtacgccgtacggctcttacctcttttggatgaccttgcacagataccgagttatgagaaagtagtgtacagatggcaagtgatcaagtgatggtacggtgctgggatacgagttgtcccgactaacaacgctttgactctcccctccccatccatccgaccattcagcttgaacggatatcggaaagtggcggcgcacacggacatcagatataggtagggagaagcggacatcagacgtccagcaagcggacatcgacatgttcgtcgtttcacctaaaatagatcaatgtccgttgcgtgacggcatcgctttctacatgaaacctccaggcccctactcagcaccgaatcatagtgccataaatattgacgagatcgtgctgaccacgaaatctcgcgccttccaatcgtttgccgcgatgtctacaatgccacgcccaactttgaatccttgctaccactcgtcttcgactcctcgctcgcagtgacctcgtccgaatcgcggttgcgtcggtaatccctgttcgacagatacaatattgctacaggacaatcccgagatcagagtcggcatgaattcgaaggctcgtcagaacgagagcaagcgccagtacttacctaagatacaacccgcttgaagtgccgacgccactgaagcggcgatggtgcctttcaagactcgcggttgttcagtctgcttgaacaacaaaactacacggcgtccagcatgatggtcaatcgacgattcagcctcctcaaatcgatcgatatggtgggataaggaaagacttacgaagcaaccagcagttgaaggagactgcatagagaggtccagtcgaatgggttcaagctccttcttcgggtctcaaccggaaggaactcacaagcgacactattgaaggtacccatgactactcctcgcttttccgaataatttccgatgatctcgctgcaccctgtagatatggatccgagagatcagatcctgtcgctccaaggatgctttatggggctcaactcacaggaatacaggatccccggtgtagcgcttgagagagagccaccccgcgccgatcagccaccaactcccaacccagctcgggtcagcatcacagactcacttgactatcccggacaggtaataaaacacccaacggactgcacgattttcttgataaaggggtaagccggcaaggacagccgtatccaccgaatgccacagggcgacaaagagtaacggaggccatcgacgaccacggaagaccgtgtcagagagccaggcgaacctgagagcagagacgatctgggtggcccagattccactcgggtagctaggtatgattcggtcagaggggttcgctcctcgggctgagaggataggaggcttactagttgatctgctctactgtgtacgaaggcgattcagagtatttcaaccagaaggacatggattgttgcgggtctgataacggatccttcgagatgatcagcgaaccgtctctcttctcccgaggcgagtttcgactcactctgcgagaagatgtacagagagtatgtcacggtaaacaaccagatgtgccattccgacaggagcttgcggaagaaaccaaagttgaaagccccctgttgaggacccgcccgcccagcgagtcgcatacgttcattactaagagcgatatcgcgttcgttgaagatccagttgggtttgatcttggtcggtaggtccgggatgaagacgctgtagaccggagtccgctgtcaatatgcgctcagaaggacgatcgtgcatggctcggcgtcctcacaaggcacaacaagcgatcgggatcgagatgatcgcgtcgatagcaaagatccacctccagccagccatgccgagtttaccgttcagtattttatggaccccagcttggagaacaccggagaggagagtaccaccggcagtcgcagcctgaaatatattaaagcgtttcgcgagttcgtcctttttgtaccaagagccaatgatgaagaggctgaaagttttccagtcagagctccgtctgtctgcgatgaccggtcgacatcaccacttacagaccgggataatatcccgattcgaacagtcccacaaagaatcgaatcacatagacgtgcgtccagttcttgacccaagtcgtgcacagtgtcaaaaccgcccaagtgaactcgagcgtaaagatcacgtagtgaggtgacacccggttgagtagcatggtaacgggaatctaggtattatcaggcatcagcgtaaggttagagagatatgggtcgggcaaggctgcatacttggcctatcacgtaaccgaccgtccagcaggtggtagcatagttcagctgcagaccgtagccatgcagttcttccctgtcagtaaaagtctacacttcagcgactgctgatggatggctaccgaaaatgcactgacttcatcccagatacgactgtcaaggtaatggaatataagccaattagactgcaattgatgtaacgacttgaaatcctggagatcactgacaggcggtagacaggttcgtctgatcgatgtatcgaatcaaaagacccaataccgagaagacgagtagcgcaaagtcgagtttcatcaggaacttcctttctgagtcggaataatcattagaatgcctttggagaaaatcaatcgagttctgtcactgctcaaaatcaacctgcagggggtttgccaaaagaatcccaaagaaaccagtaccatcgcttgttgaaaggacgggcgaccagcgcgttcggatcagtgacgttcgggtccacactgacaggcaatttttcctttgcgcccaaagcgatgtcatgaagcggtgaagtcgcggttatggtgttgccgttggccgtttcgtcaaacattgaagcggattgaacgggaaagtctgcgacatttacgtgggtgtttgtatgtcacgcaggaatgagcccatctgcagacttgtgccatgtgagaatgttgattgtatgatcgcacgtcaccgagcaagcagattcaagatatggtgaactccgaggccgactttgcacatgtggtcgatcggcctctatcgaggctgaaggcggcgcgattgcgacatcgattgacttggtcactagcgcgacgcacgccatccgccagttggagtgaaaccttctggtgcgccgcatgcatttcatcgtgactatacgatagtagcagtatcgtagtgcgaccggacaagctaagagattaccttcagacgtgcatcattggagcacgtcactgtccaatcccatcgaccggcgaattcgtatgtcgccgacccgactcaacacttgcatatggcgtgatcgtttgggccgagaatgctcactgtcagcccgagtcttgcactatatcgcaaccatgtttaccttcgtgatccgttcaactgtatacgagccgagaactattgctctttcacgttgcataccactagacgataccgttatcacgtcaatctccttgcctgacttcgtgggtaaaaaatggcagagatacagcaagctccagcggaattgtctcgtcgggttcacgaagacagcggccctgggagatcacttggacagcctgggttagcaccctggatcgagccgaggatgacgacattagtgtgtgagtacgctgtcacgatatctgttgcggcctcgtttccagtatagcttacctttccggaatttcaagccgactgggccgatttagagacagtgaacctggaactcctatactcacctgatcccaaggtccgaaccgatctgctgcagcggaccaagaaagctctgagcgtagacggtttcctactggccaccggactcggggtctcatcgtcaacgattcgacgacagctcgctattgctcaacatcttacgacagggacgccgcgggaggtcaaggaacagtacacggccaacatgtcagctggatcataccggggatacaaactttcggaaatctggaacaaggaaggtggagtgccggataatatcgaggtgagtggcattagtctctttgcgtttcgagattcacaacgtctgaagtattgcgatgtatggccgcccagcattacaatttcgagagcgaatcgttcgcgcatgtctccagccaacatccagaaagcgccttgccccttctacccgagattgaagctttcgcgcagcatacctatcactacatcatccggaggatcctgacgctcatctcgctcactcttgagctggagcccgatgccctttggaacctgcacgatcatcgtccgcccatcggcgcggcttgccagcggtacatgcggtacagtcctcgagacgaggctgatgaaaaggcgaccgctgggatttggtcgaaagggcataccgattgtaagtgcgggataagcaatcggagcacgtcaattcatcccgcttagatcgagctcccatgggtctgctagacaataccgtctcgctattgttctctcagcccatcacggcccttcagattttgactaaagagaacgaatggaaatgggtgaaacacgtgccaggcggtgccgtcgtgaacgtggctgacgccctcgaatgtaggtcgaagtaaagctcgaacggagattgtagacctgacccgaaatcgtctccctagtcctgtctggcggcgtattgaaggtgacccgacaccgagtcatccgtccgcccgatgatcaagcaggtctgactcgatacgtccttatccattttgcacgagccaagctggacgtccgattggaccctatctggaactcacctgtcgtccagcgagaggggcaacacgccttccaaagcaggatcgttgcaggcgagcaatcgccgacccaaggggaatggctcgaagaaagaatcaggagaaccgggaaagaacattgtgagtcggctcatccgtgatcgaaaagcggcgaatcgctgacgataaccgcttgtatagacgacgagaagagaaatcctatcggcagcggtctcgttcgggagaatatccttgggcgtaccgtcgaatattatgtctgatttctcttagcagcaggaatagctggttcctactctccgatttaagcacccgttgtatctgaccttgtggggcgcgaccgaatcgattccaatcatcaaacaatacggaagatcggcatcgtgaaaatgcccatgccaaaagagacccatgactgccgcaattactgctcgggtgtaatcttacgtttgctagccgggacaaaacctggtaacccgaacatctgtgcagacatctcccaatcagtgctcgctcacgcgcaacgtcagcctcagaccgacaagctgaacgtacctcgaacatcccttccgccgctgctccccaacctctctccccctcgacccggttatccatccgccttccggatataagaccgacgaccgtgccagtatccaacctgatgatcggcccacctgacgatccagacgtaggcagtggcgaggtttgcaggtgaggaagcgtgtgggaagaaccggccttgtacaaaaccgaaatgaaatttggcatcggtatttcgtctggagttgtgggactgagaggtacatacctctacttcttgacccgtatatgatcgatacccgagcatttccccgaccccccaccgcttatacgctctgcctcctatccacgaagaagtccgctgcatccgttccgtcccttgattgtctccatcgacaagagaatgccttttattaagcttgactacaggttcgccgtcgttcaacccgctgaagagatgaactccgaccttgtgcccggcagggactgggtaaggggtaatcggcaggctcttcagtttcttccccaagagattcgtctttcccggtgaatggcgagctaggaagagagaaaggtcggaccgggggatacttgacagacaagattgtagcagaacaggaagaccggttgaggtgaggatgaaggagagggaacgggggggttcgattgtctgatcgggtttgggcagatgtcgatacatctgacataaaccaccctttctcagttgttctttccccttggccgaaagtttgggcgtgcgtactcacctcttctaaggtatgcgcacatgtcattatgtaggcttcctgatcggtatcgtctggctctcgttctcccgtttgtttcccgactgtactaggtcgaacgttgagtacgaaaccggagcagatcgagatcttttcgatttcgaccttctgatccgccgttccagagctcaagagagcatggaccaccaaaacggtaccatccccttcctcaccggtcggagatgccacagacatactgtgatcgaccagatgtgacatcctgagggtggcagggtgctcctcggtcaccaggatacgatcatccaggatcctatcagagtggcaccggtactgatcatacatctcgtataagttcggcggccttggacgaatagcaaggaggtctcggatcgaatcgaggatgtgagagtcgagagggtcggccaggggagttgaatgcgggctctcgatcgaggttgagcgagatgtcgagacggtgcggagaagaccgaggcggagtcgtccaaggcatgctgaggttaggcagttggttcggaaatataacatgttctcgctatacgatactaccgatgtgatggctgcattcggtatgaattcatagtagtactacctgatatagatgcaattgagcaaaatgatcaaaagcagctgtatcgaatgtcgaaaggtcgttcggatgatgtccgatctcgatcagatacttccgaaactcaaaagcttccgattagcttccgctatccaatgatttgcttccgagaaccgctttcgtctccgaaatatccatgtttgtcacggtcgattgtttaaacctgctgaacccgaggtggaatcgattagagtcacaagcctcaaatactgccatcgtggggtgatacacctatgcgtacgacacaacgtcgagagagtatccatcatctttctcaggcagtagaaggctgaccctatttggttgatgacacaattgcagcgcgcaccatttcccagaaatcaaaagcaagtgatcgtcgtcacttggagtggacttgtcgttgtgcagccgtaaggtttcaggctgtatgacattacaatggatgatttctgccgctacagtgtcgcctttgctaagcgggagcacgagcatggctagcgaccttgacgtgaaagatagcaacggcccacatgcgtttctcaaccgctgcaacgttattatacacaccgaaccttgagctgctcaaacagcgcaaagcgagctctcgttacaaaagtctgtaccgttcgttcccctatatcatcgcgccggccgtgcgcacgttcgcgaggtggcgatctctggctgttatttctgttttcggtctcgctggccccagcgtcgtctctatctcttatgccagctgaccaatcttgagagacctctccgagaaagctaatccatgttccaacctgcctgctcgacgacgaacccgaccgtcaacttcgcgaattggagcatatgctaatgatccaggaaacaagcacatcctcaattagtccatccgttttacccgcggttcttcgcaagacatgatactcgcctcgaaactgaattcgccggtcgagaggtccatacgatcggctacagtatggacatatggatcaaacagtcccgccataggatcggcctcggtagcaaaggccgcagggaacccggcgtgttggaatgacatgtagtcggaccctatccggatcgccatgagcgaagttcagcctcacccttgctcttccactcgtccaaaaactctgacggggacatacctgcgcccttgaagagctcgctccgcttgacggggatatcacagtattcctcggcgacgcccatgatccagtccgagaggttaggatcggcttcagtgctgatgatgttgacggtggcattcgagccttgcttgacgaacgccgtcatatcctaccgtgacggtcatctcgaactcagcctgctcaatttgcccagagcttgccgaacgcgaaatcgactcacaaactcgagcatggcgtccaccgtgacgttccttccgaccatgaggtccaccacatccaagcttcccaacaacccggcttcttccgctgcatacagatggaactctacgaccttgtctttgggccggaaacccctttccaccaaggctcggaaggcttcgaggatcgtcacggtgccgctcccgtcatcgtcggctcccggagcgggtagaagaggaaagagatagttggcagagtcttgatgagccccgacgacgacggtgggaaagcgggcgtgtgggatggtagaggtgttgcgaggttgttgaggtgtcgaagggggaagtcggggttgttccggtgagaaacgggcgatgatgctagattgcaggtaggcgtgagggatggtctcgaccgagaggagcattccgtccggtgcattcgccacgatctatcgttaatgcgcaaggtcgatcgtcataagctcccgactcctaccctatgttccctcggccgtcgttcaacgcccaccttgagaatctcgcggaacaaccactcttgactcttcctcccatgctcgcttctgtaataccgagaatagaagctggacaaggtttgcaaggtatcgtgcatcgaatgtgtcgtcatgtgagggaagactgatcggacaacttcttgatgctggatcttgggccatgctgaagtgacgagacaaggtcgatcagcgggctggcgatgatgaggcgttatgagagacagcctttctccaacgttttgcgacttgctctgattctttgaagccaaaccttcgtaagggattcgatcttctctcccggtgagatcgacgaattttctgcccatgcgtctcaagacgaccttgtccccttctgtcatccacttgccctgttcttcaccaaagattcgtaggaaccggggttcgtccagctcgtgagctttctccggctccagctccttgagaagagcgacgacatcgaactctggagaagctagatcccgaatggtctgagcatccagtagcttggaatggttaggcagatgatgaggagcttgaagggcgagttggtcaggacttgatgagacggggctggacttgatcacatcggccgtggagagcaagatcgtcaagaccgctggaagactgttgatgagcttcatttcggttgtgtgaaaagttcggctatgatcttattgggactgcctgtgtgtcgccaggtatcgtgcctcaggcttctaggagctaggccgtatgtccttgaacctatatatatatacctcgtcggatatggccgaagccatctcgccagattggtcgcacatgcttcgaagccccggcacgagtcatcggtcgtgtttgcacatcgatttcgagtccggcttgaccgtgcaggagacatactgtaccgtagccaagtggatcatgtttaaagatgattgagctggccgactatctattctgcgaatccgtttgcaccccgttcttatcaagctggggaagtcgacagttggcggtcgacgcccatatacatccggcatatgtaattgtcggaagctatttgattagatgctgatgaacctcaacctgcgttacgaaggcgtggacgtgctacaatcaagtaaaacatgtgacatcgatggtcgtctcggttaggattgacaacgaccacatttgcgagtagtcgtagatatgagtgataatccacgccgtatcacgaaccaattcatcgacatacccatacccctaattgcgcctgattgcctagggtcctcagtatgtattgacacgtcatgaggcacaccatcttatcaagataagcttcgtcacctcgccgatcgattcatcatcatcaacccacccacccacaccacaccacactgcactgcactgcacctgcacctgcagctaaacgggccgtgattccccctgaatttactgccatcacccatcgcctccttttcctcctcgtcctcttcctctctcttttctttccatctctctctctccgtctccgtctccgtctctccccctctctctctcattcccacttgacctcggcaaatcaacctcccccgggtctagtgcacaggccaccacaccatcacctcgatcaactaaccaccaccaccaccaaccaccactctcgtgagtaccggccgtcctctgttcccccccatcaccctgtgccatcacctcggctttcgcactatctcgatccgaatccgatcgtcacctcgtcctcgtcgtcgtcgctgcctcccaccaccctctgcctgcctcgcaactactctctctctctctctctctgctcgctctcgtcgtccttctccccccgctgatctcttcctcctcgtccatccgtgtctctctctcgacctgccccatcaccatcacacccatctcgcgcccgtcatcctccccctcctggtctctcctacctcgaccatccaccacccaccaccgctactaccgccaccaccaccaacgacgctttaccccccgggggctggaatcaatcgacccacctcccatcgccctgccctgttccaccccctctctctcttctctatcccgacgtgcgtgtaaccatctttcatccatcgccgacccgacgacgcacgaacccccgtcattaccatcgcatcttcggtcatcgtcacactactcctactactacgactggcgtcttcctttgaaccggtttcatcgacaaacgcgtcggcagtagatcaggactctcaagcacgttcagagtttcggggacactactagtgattcgatcacagacgactagcgactagaccgccagacattcgtcattcgattcgacggtcgagctcgggctagatcactagaagagacgcgttcttctttgtcataaaagatgagcggatggagcgtgagtgacccgctgtgacgaccatgaccatgtcaacccgcacgcgtctctgagctgacgatcacctcgccccagcagtaccaagacagacaggcctctcagggggccgcttccagtgcacctgggtacgctcaggccgatccgaggtacgcggcgtataccgctgcgcaagctcaacagcagcagcagcaacagcaacaaggtagaggagggtatgcagggtatgatcagccagatgggtatgcggcgggacaggcgggacaggctgggtatgctgggtattacgccgagtgagtgtcgaggcggcggttgacggtgtgcacgcctattgacccccaacgcgttcatccccacgccgctgtcgacgtcgacgtctcgtagtcgatcgagtttcccggcgacggcggatacgagttctccctcgggcaggacggtagatcagcaacacgatagagccacatcgtaccaccacgattcgcccctctcgcccgcaccgagaaacgtcagtcgaccgccagccgttcaacccgccacggctcccgcgaccggtgcagggggttacgaatccgctcagcaacaaggttattacgggacttatgcgcagtacgctcagcagcaacaacaacaacaacagcaggcctcggcttcacacccttcgcaagggggttggcagcagcacgctcaacgtagcgtctcgggaggttcggctgcgggtcaaggcgtctacggcgcggccacggggagcggagcgtaccagaccttgtcggcggggaaccagaacgggaccccgaccttgccagcctcggcaccagctcatcaggcgtccaccgcaggggtctcgggcggtgggtccaactcggccaggagcgcaggagcaggagcgacgggttcgaacgcctttggagggtacgggtctcagcaggggtacacggcggctcagcagcagcagcaggcgtattattatgcccagcagcagcaacagcaacaacaacaacaacagcagcagaccccagcttcggcgcactcggcgtattacagtaacgcttcgtacgcccaaccttcggccgtctcggcgggcaactgggccaactcgcaatggaccgatccgaggtacgcagccgcagccgcagcgggtcagctcggtggctcgaccgcaggtacaggcgcagcagctaccgcggcggcagtggcaggagggtacaaccagacccaggctcaacaggcctattcgacccaggcggctcaacagcagcagcagcagcatcaacaagctcacccgcagtacgctcagctctacgctcaacaggctcaagctcaggctcaggcgcaggctcagcagcacgcagggtatgcagggctaggcaaacgtggcgccgaggacgatctcggtgcaggcggggtcgtcaaggggaaaaaagtcaaggcagggcgagaggaacctacgcacggtgagtcgggagtcggagtcgcgtcgtcgccgtcatggtccttggatgacatttcgacccgaagctgacctggtccttgctaccgcttcatgtcgacagtctcgcctccgcctcctccagccaaatcgttgttgaaacctcccaagcaggcgggcagcgcgtggcaattcttctttacggaccgattgaacgaagccaaatctcaagcccaaaccggacacaagctcaacgtcgccgaggtcgccaaggacgccggagccgcttacaacgaactctcggccgctcaaaaggacgtctacattaaacgcgccgccgacgctcgcgaggtgtacaagaaggaatacgccgcctggttggccaccctgagcccagacgagatcaagcgggaaaacgagtttagagccggacagcgcaaggcaggcaagagtcgcaagggaaacctcaaggatcccaacgcgcccaagaaaccattgtcggcgtatttcctctttctcaaggcgatccgcagtaaccgcgcgttgacgaggatcgtgttcgaggatgccgaggccaccaccaagcagagcacactggccgccatgcgatggagagagtttaccccggaacaaaagggcgtgagtttgacgtgcgtcgtggacgtgctcccgcgacgacgctgaccgaatggcgacgcgcgcggcagccctttttacgacaatccgaggcggacaaggcagagtacgaggtcgtccgcaaacaatatgatcaagacacgcaagctcgagcccgaggggaagaggtcccggaacgaccggccgccaattactcgcaagatctcgtcagcccgagattgttgtgcgccgtcttgccggacggatccgaagaggacctggaagaggtgaaaaaggacgccgactcggtctacaaggcgcccaccaaggcttcccgcgcagaggccgaagccgaggctggcttgggactcgccctcgaggcaggtgcggtggccggggtcgatgacgaggaacacgaggtcgacgacgatggtgtccaggccgatacgacgagggaagtttccgatgacgatgccgccgctgctgccacggtcgaacccgaggccgaccccgcggtggctgccgtgacatcggcagaggacgctccgttcatggacatttcggcgtttgtccccggggattacgctgcacagaccggcgaagagtacggtcacgatctgtccaccggcgaacaccagcaggagcaacatcaggaagacgattcgacggcggtcgcggccccgactcatcaggacgctcacggactggattcgtacgccgtctttcacgctggaaccaccgaggacgatgccgtcaagaccgaatctgccgcacctcgcatcgagacggtcgctcacgagggcgtctctgcggacggcaacatggcgtatagctattcgagcaccagcatggtctatggaggagaagaacaacacgccgagggggccaagatcgaggaacttggcgacgaacctcttgagcagcacaacaatgtcgacgacgacgaggacgaggacgaggatgatgacgaggaagcagaagggatcgaggctggacacggagccgacgttcccggcaccggttcggacggcgtctaagcggcggcgacgacgtgaccgttcgttcttttctcagtccgtttccggcccgcatttttgaaccttttctttcttttcgattcgctctcgttttggacgctctgttgtcccatttcattttttgtctttgtctttgttttcgatctcgacgcgacgattcggccgacttgtctttgcacgcacgtgttcccacgtctttgtgaccattccctccctgtatacagaagatgaaggtgatatcaaaacccggttgatagttggcagaaactttgtgcgtcgtggaaggctcgagcgggagtagcgttggtttcgggcgacgggagaatcgtcgatccaggtccagattgaccacgctaccggccattttattccggtaaaccgtctgccaccgatcgacctgtactctcgagcagcccggggttggtagtccagtactagttgtagcatgcagtgtgatcccgggcatgatccagccagcgcaagaagccaccacacatgctatccactcatcgtctcgtgtcgtcttgtctggccgataagatatcaggcaaccaggttcgagtctcctccaatgaccaggttcccccgggagtcgccgtagcctcggctcggctgattgacgtgccggtcacgggtttgggaacgtctgcgcatgtccggggttccagaatgccgactgacccgagacgacgtgcacatggcccaaagatacggcgatgactagtactagctttcatactcaaggccaccaccacatatccgcccgggtgtatccacgtcgttctcccccgtcccctccctctgatcgatcttcttttttgtcgacctttggttgtttggggcgttttgcggttcacagacgacggcttgcttgtcggcaagctgcaaggggattctttgcgaaaacgtagactcccctcctccaggccactcccagttgcagctgcgagcagacggggtgaaacgtacccgagttcacatgcccattcatcatattcccatttcccactccgaccagcgatcgacctcgttttcggttcgtccaaaggaagctcggcgaaagtgacttggtcctatcctctaccccggtcgagctatctacaatctaacatattttgatacaacgaccgacgacctcgacatgtcacctacaggtaggaacggtagcaagtttcctgcaaaccatctcttgaacaacaacgggcagcaagcacaggcagcagcgggatcgtcatcgtcctcatcgtcgtcgccatatcaattatcttatcagcttcagcttcagcatcagccgccgccgccgccgtcgtcatcattgaccctacctcctgctcttcccaacaaccatgtccccaactcagcttcgacatcggcctcgacatcgtccagcactgtcacaacgatggccacagcgacggccacagcgacgaccacggacccatccctactcttgacgtcggcaaccaaagcagtcaagctcgccctgttcgacgtgacaagccgtcaaggcgaatcgcggtgcaccctatgcaacgaatactcgtccaccgccaaagagggcatcttgatgtaccacgtcatggggaaaaaggaccacgtcaagagcaggcatgcgatgtgtagacggtacgaggattggggggaggatccgtactgggaggaagtgtacgccaggatcgccgggttcatcgctagcaaaccgggtacagacggattggtaggtggttcggtttccagtgtcggcaaaccccccgtatcgcaaagatctgataccggtttgctcatggtccggatgacagatggccaaagtcgtcgagtcgtatccacaactgtcctgtgagtgccggcctgcggcctgatctcgtcgaccggcctcggagctcatccgccgccgatcgtcgttcatgtcagtcgactcgaggatgatctaccagggccgttggtgggagactctacatctcgactactcgacgctgaaattcgtgagtccttcgtccatactcgtcgccgaggacgtcgagctgacaacgccggcgttgcaatcaaagtggtcggatagacaactggccgatttccgtgggtgaccgtggttcgagaccgaatctcaccgtgatgcatggaaactgacccgaggtcactccccgcaggcccccgatccgacgccgaagctctcgagattggcgttcagaaattcaactcgatggcccagctgttctacggtgaactcgaaccgccgatcaggttccacatcaacagctacgcccggggtctcttgatcctggccatcggtcccgaatccgtcatgcaactcgaattgaacagtccgtcgtcacaaagaccaggaaacgtgctcaggttgtggatgaattgggtattgcgcgagatgctctacctgtttgtggcccagttcatagagaccgatacgcccggtgagtctgtcctcccgctccccgcaggaccctctgctaaaccgccgcattgaacccgccaggctacccgaccccgtacgaatgggctcacgcctatgtcaagcaacacatgatctacctctgcagcctcagtcaaccccacatgcgacacatgacgacggattattgtcgctggctgaaatggtgtaccaacaacctgtacgaaccgaccaggcgaccgatgatcttcaggagcctcgagtcgatctacagggcgtatgaggatgcgtatttcagatacgagcaggaactggcagccgcccaaaatccatcccagcaacgtgagtcggctttcgagtccgagagccaaccgtcggtactgtgggcttacgtgtctccgctacagaacgtgaccagttcgaattcgccgacatcatcgtggccaccatgtcgcacgagtttcaatcgccacgacggcagagatagagcaggccgcacgcacgtacgcacgcacacacgagaagcacgcggatggtgaataacgacgacacgtaacgatgggcgagccgagccgagccgagcttacccaagtgaggaggggagagtatcatgtccgtagcattgttgtagacgagtcctagcgataaacaaaaaggcgccgggtcataatactagatcggggatcatcatcagtattccccaaagcagggcgcgttgactctggatttcttgcagatttgagaagcgggacagaggctggcagaatccgctcttgcgaagtttcgagacttcggacgacaaggtaggtcgcaagtcgaaagattggaatgcgtctttcggatatagacatgagaacgattgaagacgtgaagaagcttccgacgatcgacgaatggctcacagattcgacaaacccctgtccgagcatccggctgactcttgccatgacctcgtccggtgaatgtaggaacaaggttgacagcctagtccccccacccccaaacgatctctccgccatgtcaacacgagatgatcactcatcatattatggtgtagcgcaaggcctcgctcgcctgtgcccaatcgactatatcgataccgaatccgaacaacgaagggccacagccacgaagcacgagcattcataaaagtcgcgttcgccgtgtcgggattcttctcccgaaaaggcgcgcgacgttgttacgatgatccgacagcgcccttcctggccgtgctggaacttccactgtgccgttttacaagactgaccgctgattcgggatggaggtcagaggtggtcatatcacatccccacgtatgagtctggctattttgatcagacgatctatacttctcgaatgagacacgatatcgggtctcccggttggctgaatgaaacgtttcggagtaaggaaacagcctccattcggatcgacgaaacctctgttctcagcttgtatcatcggatgtcctctttgagaatagatgagtcgtgtagttgtcggagacatcggccgcagcgcaatagctgagcataatatattagcgatcgcgatcaccatggaagaaccggtcttccgtcttcctaagggttcctgattgaggagttcacattccaatatcctatcggccaagaagggacaatgaagccactgtgaatcatttcgagcccgatgtacctggaacggctggaaacggtaactcgaaactggccattgagcagttgtgctcataattgaaccgccttcagacgcctccatagaagagagctcggaagcaaaatggaggtcagacatttacaggcagacatcttaagagtcccttgacggagaggaactccccacaatttgaaatgtcctaggcaaggccaaactaccgatccgtataggtggccgtcaggtctaatgagaaagaatctcacgctttcgaccgatgaaacgaaattcgtcaaggacgagacgaggccgcaatctcatcgagaccactcgagcgtgtgtcatgtgccaattttgaggatagctcacagcggattgcgatgctttgaagtggcagcgtagcgatacaaaatcgactccttcgagccgaatcgatgagtgacccgatctaatctcatgtcccgcgagcgcccgtctcctttgacgaccgagtcgcgcgagtcatctcggctcaatgtcctcccggtttcgaaagtctcgggagcattgaccagagttaaatgagcgacggtcaattttattcactatcgaccgtcgccggggtcgcctattcaacccctcgggcaccgtcgcagggagccccggacgttctactccttcatctatatatcctggaccggaggagagcgctaaacgaacctcgcgcgtttcaccaacctcacaatcacactcctcatcaatcatccaacatgaacaatctcgaccgcgattccaaacttcgattccttggcatgacacaccggaggagcgagcatatatcgcgaattcgagcatcctccgaactgaagcgtcggctcggattcttgaagttttccgcaaaagagttctcgtttcgtgactgagcctcgcatggtaggcgggccacttctatcagagaattcgcaatgacaagcgagacggcatcagtctctggtgggacaagaacagacgaggaggactcggggctcacggtatttcgagatcaagacctgctctgatactggcgcgactcgagtccgttccgttccagtcactcaacaagagcccacgccggtcgtaatcaacacgcaagatcttaaaagcgtctcgttctcggatgcatgcattccgttgacgcgattgtacgacctcctgtgaagttaatggcgatcacgttgatgcgcacgagaaatgtgggtagaacaccactcgcatgatgcatctgggatttgcccggtcgatggcaattcggaatggctcccgatagagctcgcgcagggcacggtcagagatgatgctgttgctcgagaccctctgcgtttcttgttcgtttccaagctgggacaagagagacatccgaattagcgcgggcacgtcaggggattgcggacagagttgggccgacgaaatgtttcagcgccgtggcgattccctgcccttgaactccatctatataagcgctggctaatacccctgtcaacagaggatcctcggagaagcattcgaaatttctcccgcccagcgggttgcggtggaaattgaccgtcggtcggagcaggacgtggacgagcttggcgggacacatactgtacgcctcggactcccacgggaccgtcggacattctaacggacgggatatcatgttctggcaaagcgggcgtctcccatgaactctgcagaccagtcgcatctcgtcatcgtcagctcgatcaccgtattggcagccgcaatcggaccccggccaacgcacctttgccgctcaaaagagagaccttttcgtcctgtttcatcgtcggctcggtgaaagaatgagtaaagtaaccgtttccgtccccgtccccgtccccgtcgcgcgttgcggacgcagcaaagtcagtttcgacaggatacggtcgacctcgctaggctcgctaggttgacaggggcctgattcttccatgcgatgcatggtgatgactgtagtcgaccggcaaatcgtatagaaaccgtcggcgagtcccgtatatgtcgttgcgcgcattcttctgcacaaaccttggagggtatcttgtatcactttcgccgtaaagacgtactgaatttaaataggaatgggatgatgattccgtcaggatcccggggtatcgcttgttccacgatatcatatcatattattattgaccgaattcgccgtcgggccaactccggttagcgcgcttgtcaagggagtgagagcgtaggtacgagcagctaatagacgatcatctagccatgtaccggtgtacccccatcattaccgttcagcgccgaatctactagctagtagctaagcatacaatcgagtcaaatgcgccagcctggtttgcattcaagccaaatggtgacagcttgcgttgagcttgtgatccttcgggctgtgaacctcgagcgggatcaatttatacttgaaatgcaatcaagcaactgagctagtcgctgtggttgtcccgggtgccataacaagatctgttacaattatgtgcttgtcgtagccttctctggtaggtactatttccttgtggttttgttcatgctcatgaccatggttgttctcgtcatcgtgttgagcattcggacgagcccggtcaataaaatcgtagtcgttgtcgaatcgtcattttgtttgttgtttgttgatgtcccctcttggctcttggcttctcgtcatcgatcatcatatgcgtatatgcgtattgaacgagacccacacaacgtcctgcaaaaattagcgtgaacaacaaacgagcactttcttgtcaatcctgccctctcttgcttctggaaatcgctgtcagctctggtagttgcttcaatctacgataggtctcgctcgaccgtcccaagactcggattcggattcacctcgtctgatccgaccatcacgcctaaactttggtctgctgcgggtcggcatcaaccagctcggacagctatttcaagaatacttgcaacatctcaccccttgaaacttgttggctgttggcccgggggtgatccggtgaaaggagtgccctggcgagctactttgaagcaaaagggacctgctcatcgtcgctcttttggtgatcgtcaagcggtaacctcacccaagcacctctacatcatcgactcgtgacttggatcgatccgacgcccatcttcagttgagcacatcgagtggaccctggaggacaggatgtgttgtcaggcgagatggaaacgagaggtcgtccaggatcacaaggtgaggctgcatgcgaggtcccggcagccgtcgacaaacagcccattgatcgtcgacgtgcctgccagtttgactatatcaacattcatgaataccacttgaacgactggttcactcgattacggtgagcatgtcaagctcgtcaagatcgtgatcacatgcctgaaccccaacatacgacccgtcttgcagctacgtctttgtctacctcttgctcgccaaatcgttcaccgtctactgcctcgacatctttacggccatcaccatgttgtccaccgacaattggaccaacgccatctacagcaaatgcggtaacaactgtgcagtgaccatcaagtttgaagtggccaagtggatctttgtcgggtgcatcattgcgtcgtttgtgctcgtgagtgagaaggaggggggaagggagacggtgccgagaggaaaccacgctgacaattgggccctctacagctcgcctatgaaagctacaaagccaggcagatcattcgcagtcgagatatcgcttttgcctacaccaacgtcatggccaacgactattactcggtccgagattacgactacttttgcttctggtgtcacgtatcggaatcggaaaagaaaaaggacatgatcaccggattcgtctttttcactttcaaaggcgagtccctattgctagtgaccgtccccggactcgacgactgaacccgcccgacctgaaccggacagactggaaacgactgatcgccgccgatggacctcgtcaaagcatcaacgcgctcaccctctactcgtttgcctatgccaacggatttcaaacctcaaacttgcccgcctactgggacaactcgatcatgaccttgctcttgctcctggccatgatcgcgaccgtattgatctgggcgatcagcatgttcttgttggtcgccgcggccgtttgttacatcccgctgctgtgctacattcaaggcaatctcaaggtgggccgccagggtgtcgagaatcgccaggaccgagtgatctgtagctgacgacggggaggtcttaggagtatgtctgccacaagactgacaaggtgagcccggacgatcacgccctcgtctgcctctttcattgatccgagtcgtgtctaccagcgcatcgccgaactcatccgccggaaacaacgacaacgactcaagcgcaacatgctcctcgaaaagcaattggccgagggcgctccgatcaaggacaagaagggtcaagtcctgcgtagcgtacagcaaccgaccatcccgatcgtcgcgttcgacgaatacgacgaggacatgcggatgggtacaaacaagggaggcgccagggcgagaccgatatacaagcatagtgccagcgacaaccatttggccgccaacgagtacctaccggatcacaaacatcaaccgagacgtgagtggtggggcagattgaatcgatggggcgtccacgaaattgacgtcaacgtctgcaggccaattctcaagtcagagcggcaacgagctgtttgatgggagttatccgccgacgctcgactataggtatcaagagccggttccgttgtatgccgggaattatccacacggaaggtcagtagctgcgagcccactctcacatcggccatcatcgctgatctcgacgtccgtctcctgccgccacagctcgacaaacttgatggccaacgccgccccgcctggaatatcctactcgacgccctcgctcgaaccgcagccaccctacgaatatcagcaccatctcgcaccgagcgattcgtgggagcagtacccatcgcctcacgtcgtcgactatgaaccggtacaacatccgtatccacctgcacccccatctaaacgacacagcggactggcctatgatgatccagccgacgaaccctcaccacacgacccttatgccggccacacaaagtcgccgcaccgtctctgaccttgacaaatccgccccttctcacgccaggtcacgctcgtcgactccgaagtgcatagactatttcacgttcacgttgtaaactttttctacacttgggtaattctctcggtcgtctttacatgccaggctcgaaaagtcgtcagatcgtacagggttcgttagatgtagccatcacgctcgtctactcggttctcccggccgggctcaggttgaggaccgcttccgccatgattctcaggtatgcttcgcgagattcttgttcaggaatcacaccgtccgcctgtggtcgcgcccaaggttcaatcaacgtttcatagtgacgatgcgcgaccttttggctcaccatcttgatagccaacaagtcgggcagcttggaggacagtccatccaaggtctcggtcacgtccgtatgccatccgagaactatgtcttgatcgaccgccttttgagcgctgggaggttggtacttgcggctaggtgacgtctgttccgagactagacggttgtagaaacggatgtggcgatgaagctgcaggggaaaaagagctcgagatgtcagtccaagagcggtgggtacgagggactattcacgactcaccaggacgaggatcgcttcgatggattctgtcgagcgagaaggacaatcgggtcagcaatgccatgcctggggggacgcggtgccgatacccacgcaatgcgactcgagcctcgatggcggcaccttcccgacgagtcaacagctgcgctcgagccaggcgcttctttcgagcgtaggatgcgtcagaattgtcagtctcgtcaatgcaggccagctgacaaggcgtcgtcagatcggggtcgactcggtacggagggacagacccgactcacctcgtccagctcggtatcggacaagacggccgcatcctccgagatcaatcgcgtcaggttgataaacaacgaggtcatgcttgtatatcgaccgatgttctcgtcgagcgttgcgaccaggtcgtgcaaggtcacatatgagactgggtagggtcgaacgtcagcaccgtctactgtcaacgaccaccgagctcgtttcgtgactcacctcctcccctcgtggcttgtcgatcgtgaccaagctggcctccggcgatgatgacaggcttgaaatcttcgctcgaccccgtacagtcgacatagtagccgagcaacgatctctgcagaccatagaccacgacacggatcctggcctcgaagcgggtgcaatcttcaaagactgaaaaacaggctgactcgtcaactcgatgcggtcgaatcggtactgccatgcgccacccacgttgcaaggtatccgccagagactgctcttcggcgttggtgggttcgatctgcgacaccacattgtctcttgccacaaaccgcaccgccgcagaccgcaggaccgtcgagtacagttcgagaacggattgcgagttctgggagaagtgcacctggttgagccggcacctacaaacgcagacaaaccagccaggacaaccacccaccttgaccagcttgcgctcatcgtctgccaggacaaagaggaatcgaacgaccgtctcgagcgcctccaagcccaggagggacaggttacgctcgtcttcccggaagaatgggagtaggacctcggcttgatctcgtgcaaagcgagaggcagccttgaaagcagcgatcgttcgtcagcagggtctccttggttctccttgcacgacacggcccaccttgtaaccccgatctcccgccttgccagcgatcccgacgagcaacttcatgaccggaataaacgcccgatgataccgctccgacgagacggcaagcgcttcgagattggctaatgcgagagtgagacgaccgcatgagttcgaccgacggaattactggtcccacacaaccgctcaccgttcgcagactctgtcggcctagcgcccaagaaacgacacgcagcaaacgattcgaaaacgccagaatccacgagtgcctcggctccaaacgtcgaccgggcaatcctgctcaaaagaccgatctgagtctcgagcacaaagagcgggttggcgtcgactgtcaagcgggtcagattcagcttgctgtcagactgcatatcccggccgcaccgtcctactcacatgcttcggccggaaagaccccctggatcgagccgtcggctaccctgatggcggccataaagttgtgcaacagacccctcttgcccaggctcgtcacgatcgcgtccatcttgtcggcaaatacggccaacagtccgtccagcaacgtatagctaacgagttgccaatcggcactgccgttcaaggcgtcccgtccgatgatccccagcaaccgctcgagatcgacatcgaccggttgcaacacggcagtcatccagagattggcttcgatagcggtagcacctgattcgctggcatgacgacgtacgacctcgaggtagttggtaagcgtggcgtacaataggccccgcgccagctccgaaatctcgctgtcggcaatcgctcgacacaccaggatcaagagcgcctgcaaccggtcgacagggggtcctcctcgatgcttgacagtctcggcgtcgtcgggtcgagcgagcaatcccgagatggacaataagacggacgacagtgtctcggccttttccgggatctgcatcgtcggactgagcaacgccgtaaaggccgcggcggacatttcaaacatggcggccggaccaacaagcttgtcagtgtcggcgtgttccttggtcaagacggccgtcaccgcagtggcccagcttgctagcgtcgacttgacggcattcgccacacgagcattgccattctcgcgttgcaagtaggagatgacgtcttgtttgttctgttcgagcgtggcggtccgttccgacgaaggcgccttgcgttcgagcctctcgatctcgctccgcatggccagctcgaggcgggtgatggcatacactgacgcgccctcggcatcggtcccccggtaggcgttaaagtcgatgcgctcgaatccggcggcgttggcttcggtcgtgtcgggttgccatcgaaagtccagtcccgacaacagggtcagggccaagacacctcgcagcggttcaaagctcgcagccgtgctatggaacaggctctgcacgatatggaccgcctcggtggcgctggattcgagcatgtacagttcgagcgacgccaggtccagaacctcggcctggtagtgcaggaaatagaccatatccgaggtcgtacattcgatcgagctcccgttggcgtacgtgacgagggtctgctcggcgtcactcgacacttgcggcatgaccggtaggtagacgagcgatcggtgaacgaggtcttcctgtcctcgcaggtaccgggcggtgacctgggccgtggtctcgcattcgaccagttgccgcaagagcttgatacacttgtacccgaattcggccgactcggcaatgacagagagaggcgcgtcttcctgcgcaccttgatcgagacccggcaggcaactcgacaatcggtcgacaatgacatggaaacaggtgcgagggatcatctgtacgacctcggtcaccttgccctcgaccaggatggtccctgcctgagggccgtcgcgaagcagcgtcttgacgagtccacgaccgttggccccagtgtccaagaatccgagcaaaaagtgagcaaacgtaatctcggatcgttccggcagggtgttttcgagcagcaagtcgacgatctggttctgttgggtccgcttgggcacgcgcgcttcgatatcccggtcgtacgcggcgaccaggcgagatggcaagatgtcaatctctgccgtggcctcgttctgaccccgttcgagccgatcgacgaaaccggcgaggatgagattcgagctgggtgcgtccttgaagacgttggcaaggatgtttccctgaatggtcttgccaccagacaagaagggcacgcgcaggtgaggtgatcgtcccaggtccctcaagaacgacacggtctcctgagccagtccgtccgagacgtcgacagagacgtacgaggcgatctgggtgatggtcaagggttgatgggccaggtaccaatcgaccggatagaggttgcccgacgcccacggcaactcttgcgccgagtaccgacgacgcaagctcggcacgatgacttgcaaaaagatgccctgtcgagccatgaccgcgcgcaagacttggatggccctgaacgagatcttggcgaacagcgacgaggggaccgattcgggtagaccttcggccacgcggatccgagcggcggtaaagacggcgtcgcggagcgtctcgtgggcaatcactcgtcggagagcgaggaaaccgggttgttgctgcaaggcgacgagcctatccgactcgctctgtcgaatgggtgtgaccgtgcgcgccggttcgagcagggcgtccaggtcgagtccgctcagggtcttggcgatgaattgcaagatgacttggaggagcgggtaaccggccgccgagttgccttgttgaatcatcttgatgcaggcgtcaaacacgtcgtctaggatgtattcggtcatcttgcttcggatgcgtctcacggtagtggcctggttgacgtcggtgatggcgaggtagccgtcttcaggatcagacacggcgatgagcccgctgaacaagtggacgagagcgatcctgttggccgagaccccggcttcgtcatctttcctctcgagatggcccaaccacgctgcgttggcctcgtccatgctcaaggcgaatccagtggccggtcgagtcgcttcagcacgtttgctgatgggcaacacgttgagcgtatcgagcgccgatagtgacgtctcggcgagtcctggcgacacgctggtgacctcgagcgaagcaaacgtcgacagcgcgtccaggatggcggccccgagctcgactggaacgctcctattgatcatgtcccacaaccgcttgagcgtcttccaattggcgttcagttcgccggccaagcgggggtgccatttgacgacgagggagagcatctcgcaataataagtcaaacactgagcgtcaccgggcaagagttccaggtcgaccacggcgttcaattcgaaccccttggacacggccgcagcagagcttgccaatcgagccaaggagactttgcgattggcaacgtattcaaagtgttcgtggatggcatcgaggttgaggtcggacgtttctttgacgaggtgtgaatagagccagtacgatccagaagatccgctgctgatggcgaggagcaacctgcacaacaaggcccggttcgcgttgccctcggcgtctccgaccaggttgacgaatttcgaatccacccacaacttgtcgtcgtggtcgagcggcaattctctgtacaccgcgatgaccaattcgacgagctcgttaaagtcccgtctcggcctgggttcgtctgcggcggcactaccatctaggtcgaccttgccatcgtcctcgccgttcctggccatgtccaacgccttgaccttgtcttcttcgcgattcttgagctttttgacgagttgaaacgacccgatcatgtccttgaccaagctgtcgacctgacgaagcgcgtccctctgatactcgccctcgacctcgggccacgtgtccatcattccgatcggcagacctcgatcccgttcggctttcttggccttttgccacgagccagacgaaatgtcggtcgtgggcacgaggatcgttcggagatgggtaaacgcgtcattctcgatggcctcttggattcgagtctcggcgcccttgtccatccatttgcctagctgcaacccgctccgatcgtgtcggtacgccttgtcgaccagcaggccccagccgagcatcaagacgcgtgagatccactcttgtttccattcttggtgaacgatctgcggagcaggggtggggcgggtcagtagtcgagattcggatgctcgaatggatagggggacaagacttgcgatttgggtggtcacgatttgcaggcacgctggatcctcgacgaattctcggacgaggtgctgtgacgatacgagttagccgcgggggggtttcctgcctcgaacgacaccgtcactcacgggatacatggtgaacgcgtcgtatggactccggtcgtctgggttgtgctgaatggccgcaaaaaaggcgctggggacgccgagtatcagcggatctactcgtccgaacctacgacaacgaccctcacctaatcatcataaccgtggtcccgtccatctcctccctggcctttaaccacttgaccaacccgatcaggtccatcttgcccaacttgccgctcgctccgacttcatagagacatttcgccagtgctctctgatgcgatcgacatccctgtaccctagcaatctgaacgtcctctgccaatcgggtcgcctggggtaacctcttgccgctgactggagacgtctcgtcgatccacctcgtgcactcggcgatctgcttcaagatcccgtccccaaacccatcgaccgacgatttggttccacgcagttcgaacctctgcttgttgtaaacctcttcaaacaccgtgtcgagcaccaaacgggtcgtctccatcccttgcccctgaggcgcgacaaaggtcgtgggcgcggcgaggacccatttcaaacagtccagacggagcgagacgaggtcgtgaaagatcttgatcgaggtttcgacgggagaacgaccgtgccgtgatgattgttccgaggccaactggaggatcgaagccgacaagggttcagagaggtgtaggtagtcggaaataaagacgatctcttcgatccggtaggcgggaaagctcttgtctgcacagcgagtcccggtcagcaagggggtccaagctggcgttgggcaaacctcgacgactcaccttgttgaatctgttgcctggctgtagcatccggttgagggaaatccaaggggtacctcaaccattccatggccgaatccaactcgtgagcgagcgcgtcggccagctcgtccgtctctacatggtcgagagagagcaacagctggtagagctccctcggggtttgaaggagagcgtcttcgtacgtccgtgttgaggtagacatcggatggtggtcggatcgggcgggtaagggggccccgccccgttctccgcccactcgacaaccgccctctgtctcgacgtcgggccgccctcagaccgttcctcgttctgttgacgatcccgtcgagaccgttctcccaccccttatgtagagaccgaaccgaattcctttccccaggttcgcgaaaccccaccttcccccccgcaaagattgaaaatcgtaatcgaaatccgtacaaacgcacgtacacacacttccccccctccatacacaagttatatacgaaaagatgatcaaatgtatcgaatcgagattattttctacacactttctggtacgattcctgagaggattgtttgggcaagtgaatatggtcgaggtcgaggtcgaggtcgaggtcgaggtcgaggtcgacgtttgatttgtgtactgtgtagagcatgcgatgtgataagatgatggatcgcgagattacgcgtcaccagcgatccagcgatcacccaagccaggtagcaagcagcgttccaacaatcggtttcctatggactatgggtaagctcacactccattcgctcatcatcgttcatatccaaacccccctctctctctcgaggacaaaggtctctctgccggaatcacagagatatacaacctcgacaccccacgcccatcatgccgagcgtcctgacatatacgcattaccagcaaatgctggacaaggtaagagctttccccgtcgaccggtcccgtctcattcctgatcatggtctcccacttactctccgatagctcaagtccagtgatgcggactataggcgagtgtgacggacgagcagagtacgaactaggcgtagtagggagaaggctcatcctcgtcgcttcggtcggatgggttcacaggtgcatggccattatcgattttcaaaaggaagccaagcagatcggatacaggatcgaagatgccgtcgaaaaagacctcttcaaagagatactcaagctcgtactggatgatagcaatacagaggtcaagaacatggcggcgcagtggcaagtcacggagcagagattcaagagaggtctcacgtatgatgacggtcgggctgatccgggctagtccccctcccctggtcatccgtatccccagcttggctaccttgacgcaactgtctgagaaacctggaaacatcgtctcggccgtagattcgttactccgaagctccaacactgacaacgaagagcagagggatatcgcgacattgggtgggtcgaataggagtataacttctccaggtcatatagcattgacgactgaccatttggacgagttgtctgcactcagcgctcaagaacatgctcgtcgaattgagagatacgaatccggtcgtgtacgaggtcatcgacaaggtgatacagggagcttgcaagcaattgcaaagcgtgagtccccatttcgaccgctgctcgacgtcgactagtaaaatcctgacgaagtcgccgatagaacgcgatcccgacgcaacacgccgtcgagctgctcgacatcttgtcgctcatctttacgcaattctcggcacacctctcgacgaaaccggccctccagaccatctgcctctcggtactgctccatctcctgtcaagctcccgaccgcatatccggaaacggagcatcatcgccctcggctacctcgtccccacggccacacgagacgtcttcaaggtgctctctgagcgtctagtcggggtgctcggtgacggggccaacgagatggagaccgaggaagacgaggggatcgacgagacggcgaaaaagacggcctatgccgccttggtcggcacgttgggaaagacgagcccggcaaagatcggaaagatcttgcaggacgtcgtccccggcatcttgaccctctccgaggcgaccgaggaggaagaggccctcgaggcgagcatgacggtgagactctgcgctcagaacgacgtccgatcgccaagaacaacaaggttgacgacgacgtgctcgaaatcacgcagacgctcgagaccctcgtggtcaggtgtcctaccgagatcaccccattcctcacacagatcaccgccagggccgcggccttgctgaagtatgacccggtaggttcaatcggtaccggaactcgaccgaatcttcacgctgatcctgccaaccggcatcagaactatgctgctgatgacgacgacgatgatgatgacgacgacgacatggaggcggaaggcgatgacgagctcgatgatgactttgatgaagagtaggtaggcgacgagtcacactcacctgtcgtgcaacgcactcatcctggtcacgctctagttactcggacgacgaggacgcctcgtggaaggcgagacggtccgcagccaagttgctccaggcgctcatctcgacccggatcgagctcctcaacgattggtatgcgtcagtcgcgcctctgctcacgtcgcgcttgagcgaaagggaagagtctgtccggatcgaagtgttcgccgcgtgggaggctctgctcaagcagaccggtctgtacggtggctccaactatgtcagcgccggcgaagctccgacagggttgaagaggaagagactcgacagtctgtccgacgagaacgcttacacgtgagtcaacctcggtccccgatcgtcgtcagcaactaccactctctgacgatcgcttctctacgcctcaggaccagccctttggccggtcagaccgcctcgctcaccaaggctgcactcaagcagacgacctccaagtctctgccggccaaggagaagagcttcaacctgctccgatccgtggtcaagctcattccgggctgtctcgacgcacaggcttccacggtggtcggaaacgtcaaaaaggccctcgcagggatcccgaccggatctggtggatccagcaacacccctttggtcatttccatcctcgcctttatcggcgcgttcgtcgagtcgcatccatcccgaatctacgccagctcgctgccggaactggtcgattctacggtggcgttcatggccgacaagtatcagcgggtcagcctcgaggctctagggaccgccgctagtctggcaaaagctctgcgacccgagcccgtttctcaaggagctgcgccgctacccacttcttacgtggcaccggtacaaaagctctatggagccgtctgcgagatcattggcagcaccgccgcggactcggacgtccgagacaaagccatccatgcgatcggtgacctcctcacccacgagggagaggttcttgcgccactatacgacaagtcacttcccctgatttcggcccgtctccataccgattcgaatcaacttgcggcgctcgaagtcatcggtgatatcgccgagtcgaacgcttgcgcgggatctcagatcgatcaatggctagccagtgtactcgagcaattgcccgtgctcctgcgtcgttgtcccaaacagaaccggggcaaagcgttgagcgtcctcgagactttgctgaccaggtaagagtggatcgatgccacggggggtcccggacatctttactgacgatttctgcttccgaacaggtttggagaccaattagccactggcgtcgcttcgtcgatcgtaaccgaactcaagtcatacgtgacggtacaagacctgcacaacctcggctcgacgatgcatgtcattgcacagatgcaaaaacagcagccagccttgagagaccatctcgaaaccgaaatcttgccggccactcaggaagccattcagtcgcctctcctgcacagtgccgctctcgaaggtattcaagagttctttgcggtatttgttcgtgccacccccgagggtgcccaggatcttgtccctcaacttttcgatctgcccgtacggaccaacaagtcaatccccaccgcggaagatggagggactcaggcgtttgcaaacgtcgccaaatgcattggtactacggtagaaaacagccaagcacccgctcaagctatcgtcgcagaattcatcaagtcggtcaaggtaagtgcgccccaaaatttcgagaccccgcaacgcagccactgacgcaggatatatggtccatccgatagagaggcgaaacgggggctgatgcccaactttacttgtctttgctgattttgggagagattggacgaacgacgtaggttctagctatcgagctatgtatcacaagctcgggccgaactgacgttatcctcgtagcgatgtttcccaagccgccgacgtgtatcaagccatcttgaagctgttcacagctgaatccgagcagatcaagagtgcggccgctttcgccgccggtaagcaaggaggaacaggtattatgagtgggctacgccgggtctgaccatgcctctgaattttcccagggaatatcgctgtcggtaacactgccgcgttcctaccggtcatcgtccagggtgtgaccgaagctcagacgccggctgcgcgtctgctgtatcttcacgctctcaaagaggtgagccttacgagtggtaggacctgagaaaagtccgggtctgacttccttgtgatcccatcaggccatcgtacactgctcggacgagcagatcgtcgggatcgccgactcgctatgggaaccgctcttggccgacgacgacgacagccaagacgatggtgccaggaacgtcaaggccgcatgcattggcaaattgacaagcgctaatccggcgaggtatctccccgaacttagggtaagcttcggtatcgacaggctggtcatacgaacctggctgatggagttcacgttgatagggacgtttgtctacggctggcccggtcgtcaaggcgacaatcgtagcgtccactcggtacaccctgaccgactcgagtacagcttgtgatgaggtcctggctccagcaatatacgatttcttggctttgatgcaagattccaattacgtgagtccatgcctcaaagccgcgctgtgcaggtcgcttactttcgtccggtgccgggtttgtaggtcgtacgacgccttgcggtatcctcaaccaatgctgcagcccaatacaagccgcacctcattatcgaccaactgtcgaccctcatgcccatgctgtacgcagaaactcaggtcaagaaggagctaatccgagagtatcagatgggaccgttcattggtgggcattacctgagcagatactttgtcgagttgtgttctgatcgaaaatttcccacagtcaaaatggacgacggtcttaacaatcgaaaaggcgctttcgaggctatgcaaactctagtgagctatgatataggggttagcattcggtcccgaacttccgactaacgagcaatccatcggtacaaatagctcaacacttgcttcaccaagatgaatgcaaacgacctctttgatatcatcttggtcggccttgctgatttcgacgaagtcaaggtgttggcgctcatcatgctacagcgactcgccacgttggccgaagggatcgttgcggcacgccttgacgacctcgtggagagcatcgaaaatatcgcaaagccggtggttgccgcgaaagatgacactgagcaggacctgcaacgcaaggtacgacccggaaacccttggatatacagaaattattctcgctaacacgtccctgctggttcataggaggattctcaaaagacggccatcggctgtatcgcacccctcgccgatattagtaccccccagacgagccccaaattcgacaagctcatcaacgacttggcacgtgaccccaagtggcacgctgtctttgaagcggctcaccgatgatgcactatacgatcttacgacccctcagctttacgcccgactatacgtctgccttgtcgcggcatacacataaactgtatacaatatttacgaaaacgcgatgtcgacgttattcatgcttcgacatcttgcatcgtcgctaataccctgttgagaacgtccttgcttaaggggatccacaaccaacgacccgaccgattctctgcgtccagaatatgctccacaaccaccccgtgatccttgtattctgcgagctgagaaatatacctctcctcttctctcgcaatgaatcgatccttggcaagcttttgtaggatgtcgctatcgatagcgaatacgggagcagtcggcgcgttggcgaatgggtaagccttgccagacttgacgtcagcaggcagcgccgcgatctgtctcgtagccaaaagtttgaagagccgacgagccattggcggaacggattgaaggattcgcaagactccctcctcggtgacctcgcccgagtcgccatcggcatcgtccatgtccatgccggcaaagcctttccctgtaatggctgcggtctgccgaaggtactgtagctcgacgtcgtatgcagcataggcaggagtttctagccacgcccaattgaagcctcgggatggctgtacctggcctttccagccgttttgcgaataggtgtgtggaggagctgttgtgtaagaggtggaaaagaggataggtgtatgtacatggtcgaacgacgtgataatgtggatgcggggggacgatgcaagcagggcgagcaatgccagtgatctttcggtccgcagacccgggccgtcgatgttgtgcaggaccagatacaaggggcgctcggcaaccttgaatggggacggcaccggaagagcagacgatggcagaaagtaggtgtagatacggtaggcgagcttgtcgatggctctcgtaagaccttcctgctctggtacaggagtctgccggatctgaggaaaggtctcttcgatctcgacgagaacgtccttgatgattaggccggggtagaggccgtgagcaacaacgacgctgccttgtttggcgagatgcgtgtccgcaaactcgttcaaaagcgaacgcttcgatccgtagccatggcagatgagattgaagccggactggagcagggactgccattcttccatttctgtttgatgatgagcgcggagcgaagcctcgatttcggtcctcgtgggtcgaaccctctcctttgcttgaccctttttgcctcgaggggtacccaggaattcaccccggtcaccacgagtctttgtccggctgtctgacccctcggccttatcctcttctgcctcggcgacccttttccgtttgggccgagctgcagcgacaaagtaggcatccgcagcggtaggcttgatatacccagctgcgtccgggtccatcatcttttcgagccactcggcttgcagctcggcaagaggtcgcttcttggtcgtctttcgacctcgacctgaagccggagtaccgagttttcttcgaccaggggtggtagcaggggaacccgagggagcgttcgaatcgcttcttccccgtgtggccttgcggctgggcgtctgtacgatcccatccatatcatcgccgtcatcgtcaacctcttcatctacatcgtcgtcttgatcctcttcggctataccgaattcctcgtcctcgtcatagtcttcccggtcataagtctcgtcataatcgttgtcgtattgttgtcgtgtccgagaaggcgaagcgtacagtccgaaatcatcgtcttgctggtcggtgtgcatattggcctacaaggagggcgagagttcgaagctgtaatggaaattgctgagctggagatgtgcaacttcacgctttgaaaggggtcatatgtcgacaaatggtgagtatgagtgactagacatctggatagctggatatcggccggaatccttcttgtcgacatttgacttgtttgtttacaaagttcaaagactggaacttgaaacgatcaggccaggggcaactcgcagctggtttgagcctagcagacacgtcccattcggtgaaaccattgccatgtccacaagcacgatgattatacgattagagacatatgccgcggcatactggttcacccgaagtattatctgttgaacgcgatccgtacgtagtctacagggcgatgatcacggtacgagaatacacgagatattaagatctacagtatctaccgttccgttcgactccccccaagcccgatcgatacgtcgattggactcacatcgagcgcagtcgacggaccttcagcgccaacaagaccgatctgcgatgcaagcacaagaagcctggtcagtgagcttaccgtgccgaggaaccaatgtcggctgttgatcgagcttctctcgggtgaagtaagagtttgttccaaccgatagttccgattccaataaccgccgatgaccaagtccggtagagaatccaaaatatcagaaaaggataaaaaaatgttgaaaggcatgaagtgggggggggagttcaggagaatttgttggttctgggatcgtaagaggcgtaaagagtcgtgggcgtccgtaaattttgggttgatctttgcatgttcgatttgcgctttgtggcttgagttctgcagtgacaacagacttgagcggaatgcaccgtcagagttcaccgagaaccgactcacaaggcatcattctgcaggcaactcgggactcagcttgcgcttgactgagcgctcgttgtccgaaacctcctcatcgtcgagggctcgcttgagtccgttctcgtttgcggtgccggtatcaacgatatccttggaggctgtagcgcaacgcgatatccgtttaaaaactgatttcaaggggtcacaccgagctcttgactcacgctgctttgtggcggtgtcctcttcggcatctgccaattctgcatcacgttcggtctgtctggctgccgcctcgattccaaactcgtccccttcatcgccctcgaaagcaacgtcctggtcatcatcgtcttccagctcgtcctcctcgaggtcagcgacggggagttcgctcgtatcgtcagccagggtcgcctcggtgggatccccattgtctgtaggcagaggaacggctgcacgaggggagggtttagtacggcgctttctcatggcactgtgcccgttcactcactggtaagctcctctcggacgcctgactcttcgacgacagatgcatcaatcttggttggagtagcagcggcctctttgttagtggtttgcaagttcgaatccccctgtacaacattggctggctgggtcgtagcggcctcttgatgcagctcttcctcgttgccgtcattttcctctgtaatatcttcgtgcttgtccgcatcgtcgtacgcatcttcgatatccgtaggatcattctcttgtgccccaataactccatcgtgcccatcaaaatcgtcgtctccaaagtccccgtgctgaccaccctcctcttcgccgctttcctcttcatcattcgagctttccacgtcggaacgagctggatacacgtcccgaaccgacttgaagacgttggatttgggaacgagcctgcccgactcgtgcccgaagctgaggcttatccctccttcgccgctttcctcttcgccgctttcctcttcgccgctttcctcttcgccgctttcctcttcgccgctttcctcttcgccgctttcctcttcgtcactcgagctgtccacatcgggaggagctgcggacgagtccagaaccgtcttgatcgcattatatttggcaataaacctgaccgagtcgtactcgatgctgaggatcattggtgctgggcaattgcaacgcgtgtagaggtcgatcaggtcatgcaagctcagcgtgtcagtatgcttattatcctgtggtacaacaagtaaatggcggtgagcgatcgtaattgtagtgcatgccggcaaagaggactaacttcgccaatcttgagacccagtgacctttcgtgcaagatcatctcggtgcctcgactctcgtcccagtcctcgcccaaaacggctcgaagcgcaacaaacacgtcacgaagcggggccttatagagctcctcggccatcccgggtaacaaggggttatacggttccgtctcccaatccttactgtcagggcgtgtcattcgttcggtcgactcggcattgtcttcggacagagggaagaacagcggtctgagagcgttggtcacgatttcaatgacgatgggagcgtatttcggctcgcccgtctcttcgtcctgttcctcgtgcgagagttcatcgtgctcatcgtgttgcgcatcgacgtgttccgcctcttcgtgcccagatccctcgaccggcgcagcttccttcgcctgatccacgatgctgtcgccgtgatcgccaatgggtgcaacaacgctttcaactgcaccatttgcagtgttgagcacttgatcaacaggcttgacctgggcatcgggctgagatccgttaccgtcagcgacgttcgggctgatctccggtgccttttcgctctggacaaccgggacggcctcctcaacggccaaagccgcagagtcggaatcgaccttctccctgccagagtcactcgtactcgcagctactgggaagccctcgatcgcaggtttgtcactctcaatatcatccccaagcatagcgacggcggctccttggtctgcaatcggcggcgaaggcgggcgggacatgccaggcaaggcgaacgacgcgatcgtctttgtcggagaagccggaggctcggctgcgatcgagttgacttctgatagtaagagacggccttcttcgtgctggatcccaggagggatcaagctggcctcgggaaggcgagaaggcacggctgggaccgaggtcggcgcgggaggccagtcggcagatgtcgggttaaccacaggcccgtccatgggttgctcgtccagcatctcgtcagcggtgttattaaagggcataggtgtcattgcgactgattctggttcttgatgaagatgcaaaagcaagacaaagtgagctcgagagttcggccgaggtagagtgcgattcgcattccgctggctcacctgtcgtaccttcaggaacgttgtctgcttcagcggccatctcttcgtcatcgttctggttctcttcttcgatgggatccatatcaacctcctcgccagcatctccgaccgcatcggtcatcatggcatcctcctcataatcgaccagctcgtcgagctcatcgatgtccatcctgaaaggctttggcgtgccctgttgagctcggcagggtcgaactcgatgtgtaaggtcaacaggaaggcaatccgatcgtcaattcccaaaagcgacgtcggttcgttatatctttctatgctcatcgataagctcgatgcggatcgcaggttataatgttagtgagcatattcggtccttctcaggagagtcctagtgatagtgagtgatggtagcggttggggatgatgtcaagatgtcgaaatcatttctcacgcgtttcacaacgagaagacgctgtgactgcgtgcatgcatgcatgatgacatcgatcacattcatcatgacaataataggtatcccgggaaaaacacgaccaaacacgcaaactctaatgatgacgggtaaccataccagaagacgggatgaggaaaagatactaaagggaacgggagattatgcaaccggatagttagcggaacgtctctgcggacgggggaaagctgtaatgagaatctagaattttgtgatccaggcgagacgtgctcaaggctctcgtgctgaacagtttatagctcatcaggctcggggtattcgctgaaaagattcttatatcagtttcgagtgacgacaccacaccggcagtcggggaaaactcacgagacggcagccgagtaagccgaataggccgaagcagagtagagcgacccgtccacctcggagggagtctggacctgctcgtcaaagtaatgcttggcgagcgatcggggagctggaatggagaggagacaacatcaatcggtatgtcacctcgcgtccatctttaccgagcagttgcttacttcggggcgtcttgggcaaacggcacgtttcaccgctatcatgtgacgttaagaagtcgtcagagaccgacttggcaaatatctacgcgaccttgactcacgtctgcatgatacaccaagcgaccaatccggtccctgtaatcacaatggaacggcttagtatcgacgaaaaattcggcgggatgctaggtatcgcctcgactcacatccagtctgatggctagctcctagaccacgaccatcgttcccgctattgtgcaaatcggtctgattaggctcgtctctcaacttacgagacctcgtggatcagctcactggaagaactcgtggaactgcaagtagtctctgaagtgagggtctcggttcctatcaaatcgcagatacggtgagtacactatgacttccaatccgaatgggtggcctccaagacttacaacttggggtttccaccgttgaaagcccttcggccttcctcgtccttgccaaagatgtgaatgatctacgcgacgtgttgtcagtcaacgagtcgacttgggagaggtggaaaaacgacggatgacccaccctatgctgaatctcctcggcaacattggcaaggttcatgtaatcaccgctaccggtaggacactcgacctgcaagtcgtctccgtaatactggtagaatcgctgcagcgactcgatgagcaaaaagttgacggcgagccagacgggaccacgccagtttgagtttcctccaaacatgcccgatttgctgtctccgggccagtatcccacgctgtactcttgaccgtcgacgtgcatgctgaaggggtgctccaggtggtacagcgacaacgatcggacaccatagtcggaaaggaattcggactcgtcgagcatcttttccaaaatcttgaccaatcgatccttgctggcgagcgcgagcagttttcggtcggcacgacccgatgcctggatactggcaatgtttcgggtcgaaatgtcgggtcggttctcgataaaccagtccattcgctttttgaatccggggaatcgcttgatcacctggggttcgagcgtgagcgtggcgtacagcgggatgagtccgaccatggaccggacggggatctgctgcgagttgccggcgccccacgagatggcatcgtagtagaacccatcgtcctcgttccaaagcgacatttgctcgtcgtgagctccggggaaggtcatggcgtcggaaatgtacaaaaagtgctcgaaaaacttggaagcaatgtcttcgtacgttgggttgtgtttggcgagctcgagagcaatgttcaacatattgagacagaagaacgccatccaggcggtcccgtcggactgtcgcagggtacctccggtgggcaacggttcggaacggttgaaaggaccaatgttgtcgagacccaagaatccaccttcaaacacgttgttaccgccggaatcctttcggttgacccaccacgtaaagttgaggagtagcttttggaagacgcgctcgaggaagtctagatcctcacgtccaaacaactttcgctcgatcttgaagacgcggaatgtcgaccacgcgtggacaggcgggttgacgtcgctaaagttccactcgtacgcgggcaaggcgccgtcgggcttcatgtaccattctcgggtcatcaagtcgagctgcttcttggcgaacgtaggatcgaccatggcgagcggaatgcagtggaaggccgtgtcccaagtggcgaaccaagggtactcccacttgtcgggcattgacaggatgtcattgatgtacatgtgcttccattccttgtttcgaccgtgtttccgctcgggaggcggtgccggctgacctgggtcaccctcgatccactccttttgaatgaactggtagtactgcttgcaccacagcattccactgagggcctgtcgcatgacattgcgcaggtcgtcactgatgggaccgcgggcgactcgaccgtaaaactcgtcggcgtcgacccgcctgtcttcgacaatctcgtcaaagagttcctcgtcgttgatggcggcatccttttcgagatccttgggagtgagcttgagcctgacgacgacacatccgccctttcccgggacctgggtaaagtggtagtgagcggctgccttggtaccggtgtgttccgggttgacgaatttccttccgcccgagtcgtaactgggtcggggaggcgctggcacggtggcctcggtcggggtaccctcgccatcgccgtcctgctcgtcctgttgctcctgcgcctcgacgtcgacgacgctacctccgggcaggttggccttggatcgcttaggggtcatgggcagaccggacttttgggacgacggcgtggtcggctcggcaggtcggtgatccgggatcaggtagtcgtggaaggcgtccttgacgtagggcgtcctgttcttgccaccgtagagtcgctgtgagggatcagcaggaggacgagaccgggatgggatgacgaggtcagcgaatcgagcggggggggccgacaacatcccatctcgtcgaagcctacctcgtagttggtctcgttctcggtgaacaagaggtccgggacgatgctaggtccatcgaccatgacgacacctcccttggcaggcgcggcgggagcgggactgggcgtgcagtacaaatgagtcttgcccatcgacggttcgttgatttcgatcacgccgtcggccgattgatgcatctcgggcatgtccttgggcatctctttgggccacgaccaggtgtttcggaaaaagacttgcgggaggatatgcaggtcggccgggtcgggaccacggttgtaagcggtaatcctgaccgagatcccatcgacatgttgttcgtccttggcatactcgacaaagacgtcccagtaccgatcctcgtcaaacgcgtccgtgtccaagagctcgtactcgctgacctcgcgaccgcggtgagccgactcttgcttgagcttttcgtaggggaattcgttctgggggtacttgtagaggaacttcatgtacgagtgggtcggggtcgagtcgaggtagtagtacagttccttgacgtcctctccgtgattggctgcgggcgtgcgcggggttagatcgacgtcggcgtctcggcgtgcatgctgaatcgtgcgacgcggcgcggcgcagggtcgacttacattgcccaccggtcagaccgaacaacctctccttcaagatcttgtccttgccgttccacaacccgagcgtgagacacaacctctgatgattgtcggatatcccaccgatcccatcttctccccatcggtacgccctgctcctggattgatcaaagttgaacgaattccacgcgtctccatcggccgagtagtcttccctgaccgtaccctggggtagacgagcgtgtcgagtcgagtcgagtcgggtcgggtcgaccgagagtcagccaacgcgtcgccgggtcgcacgtcacagcacacccaacgtgtcactcacccattgacgttccgagacataaggaccccatcgtttccaatgcttctcgtacctgtccgactggttcaacctgtactcttccaccgaggtgtatcgaggtcccatcgaggccatcaagcggtcacgcagggtctgtccggcagggcaggagcggcgcgtcagtgacgaaagaccggcgagggggacgcggtacaggatcacagcaaactgacctgggtctcgggtccgagggttccaggcgtatccgtatcgctagcaggagcggctacgaggcggcgggcgcggagaaaacccgtcgagatgcaaatggaggtaagaagggtcaagacgatgggaaaaacgacagcgtcagcgtttgaactccatgcgacattcggctctgcttcatgacgaacgggacccaaggtctggagatgcgggtcgggaagaacggacagggaaacgagcacgcgagactcacgggaatcgttctggttcgaaccctggttctggttctgctcgccgggttggttctgctcggcattgttcgtctgcaacgaaggtcgcttaggaaggctgtttttttcgcgtttccaaggtcgaggtcgaacgtgtgggggtaagccagatggatgaacaggatacaacgaacgaatcaaagcacagatgatcaatcttctcatcagctcctgcctagggcaacccgaaccgaatgcccgaatctgaatcccaatcccggccgggacgggaaagggcaagaaaggacggattcacgcacttttccttttcccggacttgacccccttgctcggcctgcagtttgctagtgataggaggagggatgttgatcttcaaacgatccgaattggagctcccattgttgctgttggtgttgctgttgttgctgagattgaggttgttgaggttgaggttgctcgagttcagggcggtaggggtcgagctcgtcggcgtggaagggtcgtctgcgtcgtgacgatcatgacgatcgtggggtggtcatccgtgccgcagggtaggatcggatggtcagacaagccagaaccgagagagaccaagatggaaccgaaccgaaaaatgtcgaccagagtgattatggaatgagataagaaggagaaggaaaaagcaacagattatcagcgctcttccctcgcgggtcacccgtcctcttgcgttccctttcacgaaagcggaatactcgagactcacctgaagagggcgactgatctccactcttgttgttgttgttatccttgctactcccgccgaacaacctgttttgaagtttctttgcgctcatcctgggaggaaaggtgggtgggttttcacctgaaaaggtcgactcgggcgggaaaggacggggcgatgctcgaggtcgaggtcggagagttgaaagagagacgggggaagagaaggtgtttgagctggtgtgcgtttgtttgtagactgaggatgggaggatggggaggtccgatcgactgttcagtgtccgtcgaggtctgcgttgtcgtttgggttttgaaatgtatgttgatgacctcggttggtaggtgcagtaggtgagaatgggatgttggtgggaagcgtcgttggaatgaaatcacgggccacggggcagaggcagggggaggaggcagagaggggcaggagagcgaggggggtgaggacgaggcaggggcaaggaagggagggcaggcgtgaagaggagggcgagagtcgcggggcatgggcagccaggcaggagagagaggggaaccctgggggggagacgcggttccggatcaccgtgggcggcggctagcgttcaaaggatgacgagagaatatgacgttaatggcttcaagcgctagcgacaaccaccagccaagcgagccgagtcgaggcgtatccacgcccgcaaaggtttgggttgggtccccgcgcgcgcaaaggtcatatgaagaaacagatgaaacgaaacgtcgtcgctcgtcgcatcccggcccaggaccaacgtttcgtcgggcagaccacgagcccgaaatcttaccacggtcgtcagcgcgtcgatagggccgtgcgacttacgcagcggtgtactcgagcgacttgacgagctcccgaaggctctcgagcttgttgacagcttgagtggagagatctttcaatttgaggctgacgaaatcggggtagcaacggctgacgctctcgatgatttacatctacagggcggaaagggatagtggaaacctcgaaaccgacatcatcgtgaccgcaggcgtcggcgtctacttccttgatgttggaaaggacaaaacccacaccaccgtgcgagcagataacagctctaggtttgtggcggcaaagggcacaaaattgagggtatacaatgtgtagctctccatcgagctggtcatgcacgctggctacaaattaagcaaagtgatttctcagttcgaggctggcaaactccgggtggcaaccactggatatctatggggtaatgtccaggttgtactggtcgacattgagcttattaggggtgtcgaagtctgcttttttgaggatggcaaaattcagtcctacgccgtcctcaagccaggcgattcgtacgactttgtcacaaatacctttgctttgacgaagacgagactgacaattttcacggtcgaaccgtcatccagagtcatttctcacactgcgacacggggcttgtcgaccgagatcaccaccgctaagttcaccatagcagacgtctatctcgcagtgcaactcatcggctcaggcgccgccccatcgactttggcgttggcgagctcgaccaataccaccaccgccgccccgaatccctatgcggccgccatatagatacacagctcgttcagtatcagagaacgcttacaggaggacttgtcgaagtcagacgtgcaaatggtaacgccaatggaaaagatcaagggaaaaatgcacttcgatattcaaatcaacgggtgtctggcaagcatgccatcggggaaggagggttgtgttcaccgttcgctgacgtccaccacgtgaaacaagacgctcgacaaagacccagtctctttggagttgtgcacggctgacgttgcttcacatcgaccatacgcatcgtatgcatctagcattcatgtctggattacaagttcatcgcgtgccatcgttacgcccgccgcggtcgcccaccctcgttacctatatcccactgcccacgcactcccccggtcttgacccgcaacccactttccctcacgccttgtcgaccctgacgggctcatccggatctctcaaatcgtccgcctctcttcgcacctcgtccacctcttctttaagcctcttggcctcttgctcagactcggccgacgtcggcgacggtcgcaacgacgcctggtactcgtccaccagggcttcgaggtggggccagatcttttcgacgttggtcgatgacgaattggccgacgtttcagggacgacggggcacgggtcagtcatgtggtcgtgcgtgtcgtcggcgtgatgtcgtaatgtcgtggtcgtcgtggtcgtatttgtcgtcggttcggtagcatgcgaggaggaagaggcagcacgatcgtcactatccccgtccggcgcgttataattgaacgttcgggcaaatcggacctcgtcactcgtcgaaccggcaatctcgtgatactcttgtccgtggtagtcttggaaataagtcagcaggggcgacgtcgatttgtaaaacgccgacagtcgcttgttgaatacttcctgcgagtccgggaagcgtgtacgaggtcagctgcggtggttctcacgagctcgtgtgccgggaacggtgatcgtgacgactcacgggcgtatcgtcaggtctctgggtcagtggctctccggtcacgtcgtctttcccgggtactttgggagcgttgaagacggtcgaataagttcgacccgaaggtagatgaacccagcgggctgcgatgatcggtacaacgtggaacgacatgtcgggcgaggaaggacggtcagccgacaggtacacggaaccgacagagggcgggtggaggcaagtgcaagtgatcctctccaccaccccccgcttgaatctcttgcccttgcactcgcacgcagagactcgcctgatattcgctgcaagatgacgctgtccggtaccctcaggtggatgatcatgttcaacggccgaccttgcctgttgagcgccgagtcgagcagtccggcttgacgcagcgttcgggggaaaccgtcgaggatccagctctaccgtgccggtgccggggccgatacgggtggagagacgaggtagagaggagtcaaatgggatggtcagtcgatgtgctcgaaagagctctgtcaaaagaagacgatcgaagcgaaccttgccgtgtagcttgtccagttcgctctggatgatccggagcatgagttcgtccgagacgaggcctgcccacacacgcacacacacacataaggggagtgtcagcggtcaaacctccccacctatgcacccggtagcaaagagcccgacagtctcacccccagctttgacaatctcctcggcctctttaccgatctcggacccgttcatgatctctttacgcaggacgtccccggtcgagatgaaatggaggtcatacttttgaaccagacgagcagacagcgttcctttccccgagccctatagcaggaaagtagcagcgaacacagcatggtcgacgtgataaaggcagcaagccatcagctcccggttggacgacaagatatcgaacagaccgcgtatcaagacaaaaagaagcgtttgttgtcaaggcgagcacgcacgggtttcccgaatatcaacatcctcaacccagggtccacggtgccctcgaatttccccggatggtccatggtatcccataacgcacgcttgaggtcatccgtcctcgacggcgacgaccggagcgacgtagacgtggagaggtgatgccgcgggaggtagagggccaggtgggtgggtaggcgggacgagaagagggatggacggagtggtgagatgatcatcttggtcgggggtggcgtggacgaggatggtcccccgcccccacctccgtcccggcccagctcttcgtctgtcgtccgggacggatgcgatggttgaaagtcaataatatgatgagatacttgtcgcatggcctcgtcgaccatgatattcctctactacgtgcgtagtctacctcggccagcgaaaagagctgcttggacttccagccaaatcgagcgatatgttaatgatcccgcgtcacttcaagcagcagagtcgatgcacgaagtacgaggtccccatcgtcgcacagaaacggatacggagttcgaacacggaatcgaggtgcagacgtagtctttttactcacggtgtctggtaaggtggtcacgataagctggtctgcgctcggtggttgtcccaagtcaacctgacgggaaccgctcagtgacagggggttccctagcctgattagcgcaggctccctgcatctcagagtagcccacactgatcactgatgattgcgcatcccaatgtcggtctatggtctatgggcctgtctacgcaaagaaccggtcgacaagccttggcctgaccgttcgaatgttgggtaaagatgcttgatctcgatattcgtgtcgtcctagaaaggtcgacttgctgcatgctatgtgacagggagagtatggccgcgatgttggacatcctgagaatggtcatcatgtccacgattgtcaaagtatccgttccatagtgtacaaacagtccacctatataacggaacggcggggcgcatatgaagcgccgtgggtggccatgtatacatatcgacgagcgatcgaaggtgcatgaatcgcaaggcttgcctctggccacaatcactcgtaacgcacataggtctgcgaggaggcagacggacatgatgcatgatggtgctcgctcatggactttgactgtaccttcaagcctttccgtagcgaaagacgtgttgaggcggaaagagtgagcaaccaacagaccacaactgcatctcgtcgcatcagtcgaccaaatgaatggaaagattggcataatccacacattccgaataccgactacaatcaagcacccgagtatccttcacgcgcgatctagccctactcgaccacagccatcaagctgtttagagcaaagggttcttctgaccctcggcgaaggtgtaggtcagaccgcactttccgcacgactgcctgtccttgtgccaagccatgaagacaccggcaccacaagtgggctgggggcactctcgtcggagacgcttgataccgccctcagagtcgaccttgtagtacttgaggatggccatcttgaccttcttcctcttgtgcttgatcttcttgggggtggtgtagttcttcttcttcctcttcttggcacctcctcggagacgcaagacgaggtgaagggtggactccttctggatgtctgcgggagcgcgatggcgagggttaagcgggccggacgagttggtaattggctgcgacaccgaagctcgacttactgtagtccgaaagggtcctgccgtcctccaactgcttaccagcgaagatcaatcgctgctggtcactattgggaacgaggcgaatgaggtggtcagtctcgcaagattcggttaacgttcggttcggttcggctcgaatactcacggggggataccctccttgtcctggatcttggacttgacattgtcgatggtgtccgaagactcaacctcgagggtgatggtcttacccgtgaggctaggaggagacggggtcgtaggacagtcagcatgagcaagggcgggaaagtcgaggtgaagcggtccactcacgtcttgacgaaaatctgcatcttcagagaggtctgttctatccaaatatggagtcctgagggagggggatcgggcgcatgtcagacggaggcctccttcgaggacaaaggtaccgccgagactcaccttgaagcaaacgctgaagagtttctcttttcgcacgtattcagttgctgtcgatattgatgaatggatatatcagtagagcgagcgagcgagtggcgacgaccaacgggggggacggaggggtcaaggaaggaggcgacgcgcgtatgaaaaaggaaaagtttcgatttaacaccgaattctacgcgtgagaaagcgaaaatgaagatagtgaagactgcttacggaatgatgccggcagcgtcatcacgtccaagcgactggctcaaacgatctgccgagtctataagcgcttctcgtcagcgtgggtttgtctttctgggtgacaagtaacgcaagtaagctcatcgtgctcatcatgatgcgctgggccaattgtggggcgttcgcagcgatctccagcgagtccgatttcaccgaaacgtcgcaactcccaaatgcctgaccgtccacctttaggtataacctgctccagctggggttcgaggagctatcaaggtcgcgtttaaattgaattcacggttaaacatcgcatcttgcaaatcaatagaaaagggcgccgcgtcgtccgccataccttcacgttcgcgataacacgtcgagctccgtgttccatgtcgttatcgtttcttgcacagcgtcatatctttccacatacggtgtcatcctgggggagagtgctagtttcgagaccaacctttcgagatatacgaaatacttggtctcgtggtgccaaagatgatgccatctgtagacgctgttcaaacgttagttgtgacatcgcatgaagacctggaatgcacgacgacaaccccccttggcttagcgaaatgaagagatattggagctggctggcacttaccttcttgctctttttacgactcgagtgccgggtcgatgttgtcgatagcaagcacatcagaggccgggcccgcaagatcttgcatcgacatcgtcaagttctgatgatgtcgttgttggaatgcgatcagggtctggctttgttactgttttgttgatcgtggtcccggcgttgtcgattacaacatgtgcgcatgaagatgacattcagtctgttatcatgtcctgctggtagtcttgaaggatgtacctggtcttacggagggatgtagcagctcgttcgtcgggcggatccaaaccagacaggtagaattcgctggtacacaaacgatatggcttctcaaggtagcgactcgcatggctcggaagtagcattcgtattgcgtcttcaaccgatttggaagtggagacacgcaagggagaacgtgaggcagagcggacctctaaaatgtggattttatacatgatacggcgtggtgatcgatcaggcgatgtttgcttcgggctggctcttcctgcgggtttgagccttcgcgggaaaatgattggcggagttcctgtagtacatgcgtgttaccgcagaatggccggcttcaccgcctgtccaagactacgatgtttaggtcatcgaaggttgtttcaatggcggtggtcagtatgataagggagcacatcagcgcgactggcacgggtgaaacggacatttcgcctggaatttcccggcttgttgtcgttattgagattccggaagcgaattgcttccgatgacccggtcatggttgatcaatcgatctagcaaccaattggaacaaccatgattacttggtccgcaaatgatatgtactcgttttgacgccgaggtagactcgtttcgaccaggaacaaagtccttgtagaaaatcctgaacacaatgcaagccgcggaagagcgaaggcgggtgctcgaggagaagaaggccaagttggccgagatgaagcgggcgagggatgagaggatggcagcggccaaccagccccaaaagttgccttcaaggggtcctgtgcgtacagtctaggtttgctcaccactcgtttctgtgactgagagtttttgcgtccctggtatagacacctcttggcccaaggaagcaagaggttgatgacctggtcacctcgctgctcggggacaagtctgcgggcggatcgagaccatcatcttcactcagcggtagtttcccggcagcttcgacttctcgtgtccctcaacccgttggaagaccttcagtaatacccagtctgagaacctccgtgagcgtcgggacgggagactctgccgagcaggtggtaagatccagccaaagcgagttcaggtaagtacttcgggagactagactcaagattgaagcacagctgacttgacgatcaattgaaatgcaaaacagtgaacgagatggaagatacacacctgttcgggagatcgagatggtggacgcccaaacagagctctacgaggtcaacaccaaggtaagagttgcgttccggtatttcactatatcaagccaccacctgatgtaccgagctttaccttgaagccggtatacatcacctattcccgaggaattcagacacagccactcgatgaacacgcttcagatacggaaactgaccccgataggcgagataggcagagcggcagggagactgaggacgagctcaggaaacgtctcgaagccgaatttgaagtcgaaagggagaggctagagagagaaatcagggccgaggaggaagctaagcgtatagacgagaacaaggtggtcggtgagttccgggactctacatgatgggtcaaggcgtcaggtccagccggtctgacaaccttgtccacgttgccagaactgtccgatgcggaaaagaccaaccttttgaacgcacccgaatttgccaaattcttggaagattcgggcaaggtcatgcagagagctctgaacgacgcgtacgattacacaaaggactacacgatcggttttggggagatcgagtgagctggtctgccgtggcatcgaatgctttcgtagtgttgacggattgctattcgcctacagcgacgccgaggacgctcaacggatccggctggtctgtgatttctatcacgaacgatggacgagtaaccgttccgttactgcagtagattggtcatcgaaggtgagccgaaagtgctcacaaggtgtcgatataggacctaacccaaaatggcgattaaagtttcccgaattgagtgcagctgcgtacaacaagaaccctaaagctgtgaatgacccggacggtctagtcgccgtttggaatttgcacatgaccgacaggcccgaatttctcttccactcgcaggtgggtagacgatcggctttgaatacggatgccctgcctgctaaaaactgatgaattcgtgaatcggtgggctcgtagtcggacgtcctgtccctcaccttttcccccttccacccgaatctgatttgcggagggacctatgccggtcaaatcttgctttgggatacccgagccaagcagctaccagtcgccaagacaccgctggccgcgggtgggcatacgtaccctgtctactcgatgaaggtggtcggtacccaaaacgcccaccatatcatgacgggcggtaccgacggcaccgtctgtagctggctgcctgaagtcatggctcagccgcaggtgagtgtggtgtcgagcaaggaacatgagttcggggctaacaacggtggctcgtgcaggaatccctcgaactgatccatcaaggtcaccacaagacgaatgaaattgcggtcagctgtatggattttccagacaacgagacgagcactttcttcgtgggtaccgaggaaggcggtgtctaccaggccaaccggtatgatcgagctggagccaaggcggggctcaaccaccgcgacagttaccgcggccacaccgggccggtaacaagcctcgactttcaccctctccacggcgccgtcgacttttccgatctgttcctgacgaccagtgtagactggacagtcaagctgtggcgagctaaggcgggcaacaaggcatcgggaggcgtcacaacgatgaacagtgggccatccacgataacgccgctgtactcgtttgaggagtccagcgactatgtctttgatgccaaatggcacccaaaacatcctgccgtcttcgggaccgtagacgggaccggaaagttcgacctttggaatctcaacaacgacatcgaggtaagcaccgtacatgcccacagctgattatcatcccagctgatacgcttcctgtgtgtacaggcacctacatccacagtggctgttggaactagcaaggccatcaacaagctagcttgggacaggaaggatgggaaaagagtcgccctcgggtccagtgacggccatctctacgtttacgatgtaggcgagatggccgtgcctagagatgccgagtgggccgagatgcaaaagacggtgcagaccatcatgcaaacgagtgccatcacaacaaaccctcttcaaggacgggacggacggtctagatagttgacctggattacgaacccttaacgaaaacacacgagcttgatattcttgtaatcgcattgtgacgataatcgcgcgctctcgacggtgtaggatacaatctcacaccacgagaactgttacattcgctgcttgatgacctcggggatgagcggacgcttctcccattctgctttccaagcttcgtctaccttgtcttcgtccaccttgacaggcaatccgaaaatcccggtggcaaaccaggtctcggaacccgcctcgagcgagcctcgaagcgatggcaagacgctccgggaaaagactaggttggagttggcgtcggcctggatgatttgaccatatcgactgctcttcgatgatgattcgcccgtgagcgacaactcggccgccccactgatgccggcggacgtctctgcgcggaccaagcccgactcttcaagccctccctcgctcctctccccgctaaagacctgaacgagagcgcgtccatctgacccttgtccgtagatcggccaactcccctcggacgaccggagcttgcgaccggtcttgatcctgtgcactcgaaggtaccaacagggagcctctttggtaggagggaacaaccaggtctcgacctcgacatcgggccagggtctccaggtagagtgcagatgcacctgtccctggtcctttccgtgaggaaccagctcggcacccccagccaccctcctcaccctccatcgttctccttgcccgaagccttcgtcctctgggtcatcgcacagcgccagcattgaatccgccgcctgctgttctagaccgaatgccccggtcgggcaagagtacccgaatgccgacgagtaagagaaccgaccgtacttgctctccgcggctttaagagcgtaatgacacgcttggcccgaggagaggagatatgtgtgcgtggccaacttcggggacgatggagggactcggaccataatatgcaaggggtcttctaaaggctggacggtggggaaaaggtctttcggccagtcgagctcgtccgaagtccagaaagggtgagtctcgggaacagagaggcatgcaaaggccttggtgcaccagtacggcgaacctaggacgcggaacatgctacctttagtcctcctctcgccgtgtaatattggttgcgccgatctggactcaccaaacccgttgtagttctcggtcatggtcatgttctcgtagcaatagccaatgttcaacgtcccatcactcttgaaaatgtcctcctgagtgccccaccacctcaagtgcctcaagaccatccccttgatatgtccccatttcaaggggaaatcctcgggcaggtcttctgggaaggcaaaaggcaagacactgagcgtggagatgacggcgaaacggtagatcatggatcgtccaaagggaatgcatcgaccggattcgtcaaagtagtagatgaagtccaggacgtagcgaagagcacgacgacggtaggtctcgcaccgctcagggtcggtatcgttggcgatctgcgattcacttcgtcatcagtttcacatgccgtatgtcactcaggggacatgcaaggtcttaccctcgagtacaccatctgggcaaactggatggcgaaactaccggaataatagtccagctgcctaacgccctcaggtccatccctcgaccaaccgctctgttctccacgcagctggaatgtatctaaatggtccaagtcggccttcatacgatccgcgttgaagtgcttggacggggagatctggcggagagcgaggttggcaaagactcggaaccagagccaattggctgtaagaatcaggtagaccgagacaaagtatgtgagcatccgcatcaaaagacggacatcacttagtgactcactgtcgggcatttgtttgtcattgatagcgccgagccatgcagcgacattctcccttgcttcttcatccagaggctagtccccgcagttcacactcagaaacgactctatgtgccaaatatatgacccaaaactcagtggactcacctcgaggaactctttccccgccatactcaaggcgaacccgatcgcgctcatctccaccatcctctgatcttttcccttactctcaccccaatactcggggctcttgggatccgtaccggaagccaaacctcgagaccaggtggctgagcgaggatagtgtcctcccccggcgacaagacagacgagaccccacaggggacgggagaaggcttcgagttggcatgcccggagatcgtagtgcgtacctgtcgggccgggttggacgggcggtcagggtcgtttgctcatgcatgcgtaaggacgatacggtcttacctgacgagccgagagtaatcaaagctcctcctggagatgtatgaggagcaagaggatcgaggactagaagggaatcatctcggtcaggcaagggctcggaccgatcgtgccggcaagagatgacactcacgagagacgagtcctgcttcgacgtccgactttgtagagaacgggttgttcaagaacccgtttgctgagaggaggaccatatttgcgcgatatgcaaaatttgtaagtccgcgatacggggagaggcttgtaattgatctgttcagaaagtcgacgaggtcgttataacctgcggtatcgactcgtctaaagacttggaccaggtagacacatttcggtcattacctcggcgaatttattgcccgggccggtttcatgaaaccggcccgatgatgacgagagaatgacgtggcttcgatcgttacggcatttcacgcggacttggccgaccgagtctcacaaaaggattccgggtttcatcgagaagcgcgattatcgtctgcttcttcgtcaaatatcgttcacaaaaccgttcacaacgctcgtcacgcttctcgttgtcgagaacaaaaggtatacaggaatgaagatcaatctcagagcagcggttcaatgggcttccaacgtgagaaagcatttctcacaagcactgtcgacagagagattatcgcaccccagccatgagaagcacaacctaacagctcttaagcttcagcccgctcgtcgagaagcccgatgtccttctacgcctgcaactatttcatcttccttcacattccacttcgattcgcaatcaattctcagcatcactacctcagactacttctttccatctacaaacacatttccactatgcctcgacctaaacgagccgctgccgtaaagcccaccaattactcggacgctgacaactcgaaggaactcgaagaagaatctgtcgtcgaaactcccatgcggatcacctctgatcagaaggaaagtgttgcttctcagatgggagatgaccaggtggatggccaggccggtatgcatggggagaaggatgcggaagaggaccaaaacaaggagtccgagaacgttccttccacggaaatcaaggtcgacgctactcaggttgagggaggttatcagcccgaccccgacgctaaagaggctcttcctcaaacccctcctccgcacgaccgcgagctctcctctgccctgtctgccgcgtcggccgaggatggcggggaatacgatcccgacgccgccccagagtcggacatggaacaggacatcaacccaaagtctcgaaaaggggttcggctaatcctaccaagaggaaagccgggggggccgctggagaatccccgtccaagtcgagcaaggggaacaagaatgcctctccggcaaagagcgagaacgggggtacgagtgccggtgggacgggcaagttcgagtctacgcctgagaataggggagcgatcttgcacgagatgttgaggcatattccgacgaccaagatggattggaaggcggtcggagaggtcacgggggataatccgcaaaaacttgccaaggtgagtcgaaccccaatcgtctgcattgttgacgaaaaggctgacggaaacggtcattcattctgcgacgagaaagtactacgaccagactttcaaaaaacacctcgatgctgccgtgcgcagccaggcgtttaggggtgcggcaaagaagtgattccacgaacgactctccgccgtttcgaccgactcgctgctgtatgagattctccacaacgtctcaaaggcaagagaagaaacttgacgacctgcctgtaccgctcaaattgtgtcccaagtaaattacttagacagatcttcttgttgccatcgattgagaatttacgcatctaatgccgctgtttgtacaatagattcgcctgtctatgcaactatatactatatacaaaggtgttaagaagagttcgttctggtctatgtagcctggtgggatcctgctcggcagtctagtcatcatcgtcataagcgttcagaatctcggctggggttacggaaacgggagaggtggatcagtacagatcgaattgagctggaaagggtctatcagactgaccgtcatcatctattggcacgtgtcgatatggacgggaaccgccaaagagattatcgagctgggggaacttttcagtggcccacgcccagccggtagatgcgacaccgatcacgaagaaaggtatcgaggccaatgtggacaaagcacccgagctgcctccaaaggctcgatgttcgcccaatcggatggatctgaggtagagcaagtcacgtatcagtcactgcagggaaacctgaacccgtacgaatcctgaactcacccagtctgtcggccatttgtgttgaggaagaaccatccggccaccgcagcgatcgcgaacgggatgatcaagaggaacaaccagaaaaagaagcctcgaccaccaccacctccgattaaaccaggacaatcgtgtcgcttccctcggtccagccgaacatctccctcgccttcgcacgagctataagggatctttcggtaggcggttcgctcgtaccaatacggttcccatcctgtgcattgctcctccatctcgcccgtcgttcgaggctgagccccttcgatgagcacacaatcgccacggtcgttccgtcgatagttgaactcgcattcaaagtcgttgggtgtgcaggtacagttgcgtacgacttctcgggtctgtcgcagagtctcgcccacatagcattgtcgatcccgaatccgtcggtaatattggacctgtgaatatggcctgacggtcagcacatgctcaaggttcagcgactactcgttcaaattacctgtctgccgaagaggcactgctcctctcgactctcagcagggctccagacctcgatgtcgtcgtgaagcggatcctcgatactcaacacacctgtgcacggtctcgtcagccaacgttcaaggtgagagactgcatctcgacacactcacattttcgctccgtgattcgactaaagtcgaggtgaacgatcacgctcttggcttcgttgtcattgggtcgcttgccgagcaaaacaaacttgcgactagtctcggtcggcaccgtcaagatgctctcgacccggagattgtcattgaacgagtactcgcgccatgtcaacccttcgtctgtgctgtacacgacgtgatctgtgacttcctcgtcgttgaccaataccaggaccgaacccgagtcgccgtactcccacaagtgggcgtctttgtgcacctcttcccaagtctttcctccgtcccgcgtgaggaagacgtcgctgtcatcatatggtagaagggactcgcccacattgccgaccgcaatcatgaatccggccaccgaagggctactataagtagctttggcgtctcggcgttcggtgtatccgtgaatatgcaggccacagaactagacggaagaagatcagtcttcatgcccttcagccgactacactcaatcccgcttacggtagattgacagtcgtaaggctggtttagcgaatccttggccggaggcgtcagaggtttccaggtcgagccatcattgtgggttatgcgggattgcagttctttcttgccagaaactgctgcatcgtcaggattggcgacaacgttgacgacggcgatgccatccaaaccgatcattttttcaaagtcggtatatcctcgtcgatcgcggttgacgtattccagggcgaggttatagtatgtcccgttcgagttggatttgaaaatgctgccccattccttgccttctcggtcactcatagtaacgtggaggaagacggcgtcggtggagctctccaagatactgtagagatggaagagtcagcggagcccgacagggattgtcgctatcactgcaggggctcacgtataagcctgagtggaagattggcaggatcgagagagacgcatgagatccgtcaggtacgtatcgcactcgaactctttccaacactcaccttgttatcgattttcatattgggcgggaattgacctggggtgaaatggaatccgtcgagggagacttggaggttcagagtaccttgggtctcgacaaactaagatggtgggtatcagcctctacccctcttctcacgtgtcagcggttgtactcacctcggccacgatcatgaactctgaaaaggtcgcaaacccgacgacagaatcgaacaaggtcgtcttttggccgtaaaagtttttaccagcaatgagctgcatcgggttgtaatctgccgaccgttgcgagccctgcttgtcccgataagactcgcagatgatctccttctcatcgaccttgaggcgctcgtctcgtgcccatgagcattgcctgacgtattcgtcgatcttgttccatcgccgtccattatcggtcgtatagtacgcgacggcccggcacttggtgctcaagctgtccttgcaatcgctggacccagtgtagatcaaccagtcaccgcgtgtaggatggaaatcgagcatggcgatgccgaacgggttgggatcggcaggcgtgttgatatagttccagctctgacctgaatcggtcgtgtaatagaccctcctcgagtccgtgacaaggtacgcccggtcgttggcaaatgcgtgcatggagattgacaggatcttgttgtcgggcaacagctctacccaactgaaaccttcgttgctggactgccagactgtattgtcctcgagctggatgagcatcgtggtggattcggggaaatagtagtgttgactgatggccgaggtaaaatcgtgcgtttgatgagaaggctcgccgttgtcgggttgagcgagggcacaatccttcagaatcgggtcgtccttcctgataccccccgtgcacgtatcaccgggaatctttctgtaaccgctcgaacccttgtactgctggcccgctttcgagcactgcccggcggggatcggttcgagtcccttcattacgcattgcccattggcgagaatgtaattgaagtcgcattgaaagtcggaatcgtcgcatgtgcaatcctcttcgtgacccttttcttcgttgaacttattgccgacatagcagtgcgcgtcgggttttctacgctggtaccattgctggcgaggagaaggttgtcagtacggtatccgtttcgacctgtcaagaagatggccctaccttgtgtcccaatagacattgcttgtcttcctggggtcgagcgtaccagcgttccatatccttgtcggtacattttcggttctgcaggggcaaaaagtcgagaaagacggtggcataccgtccttccgcgtcggcatcctcacgtcccagcgtgccaaagacgaggaatttttgcgaggtcgagtctgggatggtggtcaggacgatcgcacggagcgtgacaccgaggtctagctggaccctatcgagtgacaagacacgtggcaggtgatgagcttggcggtcatgagacggcgactttgatccatctgcgatggggggactcaccaagtcttgccgaaatcgtacgagtaatgcacgtggtccgtcttgtcctcgtcatcgatgacgaccaagacggcgccctgatcgccaaactcgtacttgtgtgcgttttcctgtgcgaccctccaggtcaagccggcgtcggacgagataaaagtgtcaccctcttcgtacgtcccgagactgtccccgacgttcccgacggccatgacgaatccaggtgcggacgatgaaaacaccttgccatagttgtgcggttgggagacggaccaaaggtgcagggaacacgattcgaggtcggacgtatcgcattcccactcggacccatctgcacgggttgccgggggtttgatcgcgttccaggaactccctttcgatacgcacacacaggcgtctcagtccccacctcgtcgccgtagcaatggccgcactcgcacgaaactcaccatcgtcgtaggtcatcatgctcctgatcttctttccctccctgccgagcaagacctcttgtgcattcctgacaacgttggccaaacctatcccttccaacccgaccagcgcctcgaaatcgacgaacccgaggtcgttcctgttcgtgtttgacaacgcctcgacaaagtagatcccctcggcgtccgagaggaagagactcccgatattgttcgccggatcggtgaggacgtcgatggcgagcgaatgcgtggtggactggacgatcgtgtaggcgctgcggaagagcaatttcagtccagatttcgccgtgaaagaggatgtgtggtaggaggggagacgagagcgtcctcacttttcacgcaggttgggcatggccgaatgagggaacctggccaagttccatttctccccgtccgtgctcgtgtacaggtgcatgggatccccaccaccaccggccgccccggccctgccgcccaacttgaccggctcgagggctttgagcgcgacgaccatgtacttgctcgccactcctaatccgacgatcccctgtgcccgtttccctatccccaaatcgacatacttggcctcctcctcgaaccagtcgtcgctcttgaacaacctgctctccctgaccgagtgataccctcctccttgtttccccttttgcgatccgtcaaaagcgatacaaaagactcgttcttccggtacggcgtggttgatcgtggaaaactctttcgaggaccgggcaaagaggcaggaagaggtctgggagaggaggagcgtcggtggcgttcgaaaggccgtcgtcgtatagtacgtctcgtcccaacacgtctcgccgcctccccatggaccagaccccgtatcctcacaagctcgggcttggaagaggatccagtctgacgtccagcaaggattgggggaaggtgtgtcatttcagcctcattcccccggtcgacttggtcttccaggcgagaccgcaaggcaaagcgagatgcattcagactcaccgctctgctccgcgtggaagctcaaggtatcccctcctaaactagcttgcctcccctgcaccccgatctcccatctctgccacgtctcccccctgttatacgtcacccaatgttcctcccccttgccgagggcgaaagccatgttgtgcccgaatggatgctcgacgagcttggataccgtaccaagcgggattccgggagcgaggttccagctgagtccctcgtcggatgagatgtggatgttgtgcgcgatggggtctagcatcatgaccgtctgcccgggagcgaaggtcgaggaggaggagcacgatcagcttttcccctcggacgacgagggcctgtgtggtcgagaatgggactactcaccgtggtatcctcgaaataagaaatcttgctgggtacgtttttgaacctggtgacttcgaccttggggtcacccgcttggacgacatgatcgcctagtcgagcggcgaggccgagtatgctcccgagcacgacggcgagtggacgggtgagcatcgctcttgtggttgacaagggatgttggcgtatatgattcgacaccaaagccttgtttgtatgtttgagtggagattatttcatcagggtttagttgtttatagctgtaggataccaagatctgaaaggggagacatggccgaagctaccgagaggtggagggggaaggcgatcaaggcgatgatgatgatgatatggcgagagggggggggaagcggggggcgacgtgtaaataaacacacccacccccccatcatcatgattattacggcaaactgacgagtcgcgcaaaaagggcaaaaagaaaaaggggggcccacccagctgtgcacacctgtgttcgtgtactccttcctgtacgattgatcctcactgatgagccatctccaccgctccgtcgaccggatcgctccctggcttgcaccaaggaatgatccgaccgacttactagatggaaatggtattcacgtcattatgaatatccatgatcggaaggtattggctcatggtacagcttgtcgacaacaagttgagtagtcacccaatttacgtgacttccttctcgcgcgttggaatggacctccacttttgatcctttgaacgaccaggaggttcattcgtcactcgatcactctcgaaagatcatgtatactcataagtaccatgcgtgccatgtaccacaacgccggagtctgttcccatccccgacctcttgaactttgaaccaactcgaaagtggcaagtgatcttgcaagcgaccgggggcggctcgtctttggccatgtccgaagagatcaccttcccggatcaactccgccatacgttcgtccgacttttgacctctgacgtgaaccgtctcaaatgacaaaaggcagcaagctgacttttaggcattaccgccattttcttggtccttctatgctacgggtccattcatgccctcgcctcgtttctacaacgtcccttttggaaatatcctgaacgaccccgacgacgacgaccacaggctatccaaccatacaggccccgtcaacatcgtcaaatacaaccacacccacaagtactgcctctcgggcggacatgacaagacgattaggttatggaacccgacgaccggagcacaggtcaaggtgtatgatctgcacagacaagaagttctgggacttgatatgtaggtgcatcgtcgcctccgggattggtgtggaggtgcgtctaggagctgatcaaagtcgtctcgtacttttcgtctctccctcggacttggctccactcgtcgacgttccgaccttgcaaccgctcgacccgatcgacccgactaacagcgcaccggacaatgcgacgttcacctcgtgtggacaagaaaaggacgtctacctatgggacgtatccgccggtcacgtcatccgtaaattctccggacattacggccgggtcaacgtcgtcctcttcgccggctccgtctccccctcaccgggaaccagacattccgggtcgagcgtcatcatctctggatcgttcgacgctaaagtcatgctctgggacgtgaggagtcaagggagatcaccgatacagacgttacaagagtcgagggatagcgtgaccacgctcgccagtggaccgggaggtgcagagatcgtcgtagggagtgtggatgggacggtaaggtcgtatgacctgagaatggggaaaaagatcgaagacgtcattgccggtgagtcttggggggaaaacccgaaggggcgagtaaagtcgaagatcgcagactgatgacgacgatggtgatcgtggtcacgtgcgggaatctcagctccagtgacgagtatagtcctctccccgacgacacccaaggagaccctcctcgtcgcttccctagactccaaagtccggctcatggaccgcacgaatggacaggcgagtctcgactttcaccaaaagtgatcaatcgtatagctaatcataacctccccctcgtcccgtgcacgacagatgctagcgacgtttggagggaaagacgtccccgcagcttcaggggcagtctttgagaacacgtcttaccgctcccaggtcgcgtttgggtttggcgagaggagcgtcttggcaggggacgacaagggggcgttgtgggtttgggatctcgtcagcgtgagtggtcggtcgatgcaggtcgaacgcgcgtgcggaaaggttccaaacgttgatccgatcggcatgccctccccctccccttgtgtgtgcgtcaatgtcgtggatccgtaggcgaaacccgtcgacaacgcaccaaagaagctacatgaaaaggtcatcacgtggatcgaaccccatccgaaaagggccgacgagatggtgacggcgagcgcgggtaagtctgtgcaggccgcccgacgggtttcattccattcgattggggtttacttcactcggatgactgacgcgagatctacttgactggcgttcagatggcacgatcaaggtttgggagagcaagaagcattagcgatggatatttctgggggcatagagctttataggccgatgggacaagatcgtcaggaacaggttgtatcgcattattaacaccagcactgacgcatagcatgggaaacacatgacggcaaggccagatcagatctagacatgtccaccgagcatcgttgagaggaaagatccgatcggcatcgagtccgagcgatgggtcaagctattgatccatcacgagtctcgccatgcatcgctctccacccgtcagtgatccacgctctgcaaccgccagtatttccgaggtgatacggacgcacctgatctaaatggatctggattcataagcgactcgtgcgcttatgaacgaatgagtacctggtctaacggaagggttctgagcatcggcgcataacggccagattttgtcgtcgccttcgatgtgggtgggctaagtcggactgccatccagatcgacgccatcatcatacaattagagactcacggtcatctagttttgcttttcccgcctgcaagagcatgagcttgaacttgatatcgtcgagcggcagcggtccctccatttgtatgacacttagcgaattgatgttacgcagtcttccactaccgggaatatagacgtccgaggcgaagtttgtagagcgcgcttcactttaaggatcagttactcctccatccagatgtcccgtcgccttgacatccgtctccagggctcatcaagcagggatgcgacgttcgctactcagcgatcgcatttcaaattgggctatgcaaatccgtttcgtccggcatatgagctgcgccttgtgttccgaatcagcgcccattcgcatggcttggggggtaaaattctcgagggtggacctcgagcgactttggcaagcacgagagtggctttgtagcggggaagaccgaacagagcagggtacatcttctcaggctgttcggttaaactgtcgacgtcttgaccgagcccagggcgcaaacgtggcaggtatggtgtggctttgcgaagattgatctgaattgtatcccgtcacgaatcaatcttgtaccacagaggagagaacacgagacggtcgtcttgtcttcgctttggtgatcgtcttcgaccatcatccaacggcgaccatttcgacccgtctatttcttcatcacgatcgtggggccggttaattatacttgtacatcctgctcccacccacatcccttattccgcggcgggactacgctcgaccttcgagctcctccctctcttccctgtcttccacgccctcgtgacccttccccgccccttcctctatccacctatccacccaacctacgatcctctccacattcccctcgatctcaccctcttcaccgccgctctcgaggacgacgacgatctcctcggcgtaactctccctcgtctcctccaagacggtctgcatgatctctgcggtgacgttctcggtgatcttgttaccctcgtaaccccgatcggcgagtcgttggtagagcgtctcgttagggcaggtgtacaccacggcgaggtcgatccatcgttcggggaagagggagggggagtggtggtcgatgatgaaaccggtaggtgccgggcccgaagtagggttgaggatgatttctaggtaatccaggagctgtgaggaggagcaaaaggggggggggtgaaaatccgaacatccagacatatctaatatttgttgtagttcaattttttttttttcaagcagaagacggcatacgagatgagcgctagtctcgtgggctcggagatgtgtataatagacaggtgtggtgtcgatgttggtggtggtggtcgtggtcgtggtcgtgatgatggtgatgatgatgttgtcgattcggatgtgagcgtgtgatggatgaggttgatgggtgggtgactgattacgattacaagctacaagctactagctactagtctaggctagtctactaactactagctactagctaatagcccactattactagtctacttagtagtgtactagcactactactaattactaatctactagctagtctactcgttgcttagcctcctcgcccttagtccccctctcgcgcgcgacctgacgtctcggggtgactactcaacttgttgtcgacaaaccgtgacatagacctgcatcttgtatctttatgcaagggttggacattatcgcagtgaggtcacggccgagcgtaatgaattgctgattgcaaaaaaccatcctactagttcagtcgctttcatagcaactggcaatttctccaaaacccgcaagggtcacgcaaagtatatcttgttactttttgccatctgctgcaccaccaccaccaccaccaggtcgtctacgatgctctacttgttcacctgggcaatctgggtacttcgtcacgctttcgatcagacgtttgcaccagcacccaaattcaacccagatgtcgatattcccgacctaacaggcaaagtcgtcgtcgtgtaagtcatcgacctttgtcgtcgtcatctcggccatatcccccgagctgaccgaaccacactccactgctacgcctgcagcaccggcggcaactctgggataggctacgagatatgcctcgccgtcctccgtaaaggcgccaaggtctacatggcctcgcgttccgaacccaaggcccgtcaggcgatcacccaactagaatccctcacccatcgtcgagacgcctgtcattacctcgctctcgacctatccgacctctccagcgtggagaaggcagcgaggaccttcctcgagctggaaaccaggctggacgtcttgttctgtaatgcaggggtgatggtacccgataaaagggagatgacgagtcaggggtatgatttacagttcgggaccaacgtgctcgggcatcatcggttcatccagctcctcgtcagtcggggtccctcccttcccactcatctgcgtcaactccccgcactgacattgacactgtgtgtattcgctggacgtgacctcagaaacccatcctcgtgcaccccaaggagggcatgaagaaccggatcgtcctcctctcctcgatcggccataccctgttcccaccatggtacgcccaggcgtttcatcccgaattgaccatcgcctcggaggctcgggatgggttggggaggtggggattgtatgggcattcaaagatggtcagttcaggttgttggatgttatgggcggttctgccggatgtgtctcgtcgtgcgggtcaggtgggctgatgggtgggtcgatacgatagggcaatatcttgtcagcgaaatactttgatagggagttgggcgacaacgtcatcgtctctgcctgtcatcccgggttgatcactaccgagctctgtgagtccctttgtcgtcgtcgtcgtcgtcgtcgtcgtcgtcaagctcgacctcgatttccgactttgcccgaccatcgtcccactcactgacgacccgcccgaccccgatccttaccggtagaccgcacgaccccgtccttcctcacgctcttgacctcgcccgtgtccaaacccgcttcctacggcgcgctcaccccgctctacctgggttgttccccagagacgacgacgagcgggggcaagtactacgtcccctgggctagggaaatccccgatagtctggacgcgcgagcgaggggagaggaagggatgagacaggccgaggtgctcgatcggtgggtgggggaatgtgtgagaaagtacgaggcaggggcgggtggacagtgagtccgagtcggggtcagtcgaatcgattgaattacacacatgtacacgacatgataaaaatgaagaaagaagaaaaagtccgttcgggtataccataccacacaaacgtcgtcgatacaaaacataaagttgcgattgaaatgtgaaccgcccattgtccgtgatcccccctcacacctcgtcacggtgccgctttcccaccgctaaccctgctcgaccaccgcacaatcgggctcgctctttcgtcgtttacttctcctcgccttcatctgctcgtccagctcttcagcttcccgtttggcaaaagacgggtccgggtgctcatcggctcggctcgccattgccagcttctcgttcgtctcgcgtgtggagtggcgcaacaccttttcccactccaatagctggcagatcagactgtcgtattcacgagagtcagacctgagagcagtcgatctttcccgatggcaactcacgagacgttggttcctacccactcgctcttccccttgacaaaatcgttcacgtcccacatggtcgctcccttccctagcccagtctcatcgacaaggccatgatacgacatccacatgacgtaggcaatcgtcaaggttgccgaacgagagatgtcgcattgacaactggggcgagaacaatcgtttcagtccggtccccgcgctaacaagcaggctcggttggcggtaggctcactggatcaggatcggtatacctgccgtcctcgcctcttccatcgacgtcgtcgtcctctcaaatccccagtgaccatatttctcctcggactctgatgcattcgaccggctcgcgagatcagtctcgccatgcgtccagtcgagtttcaagtaggtcaagccaggtcgatccgctgtcgcctcgtaaactttgataccaggcgcggtctttttcccatgttcgtcccgagatcgggtgtcgaacggatcatccaactctttggcgacgttgaccaccattccccgtgccttcccgcccacccattttccgaactgcatgaccgactcttcattcccgatccagaccccgctcaccacctgtactggaccatcaacgtacggcaatcttgcatgaccttcaggatccagatgattcgagcgtggtagcggaaagagggatcgagatgcgagaggctgacgagcctgtttgactggtgaaagcgggtcgagcgagattgaaagcgtcggtcttcgtcctaccgtcgcatacttggtcaccttgctccacccttcctgaatcgactcgacttgatcctcctgtcgcttagcttccgtatgttgtcccaccgaggacgtccgtctcacgtcgattcgtagacctcttgcgttcctgctcctccctgtcgaagcttgcatcctgtgctccgcgctggcgtctgagcccctcgagtcgctgctcgacccggacaggctcctccccgaggccctagggaacgtctctccccatccgctcatcttgtcgctcgccagcacgttgacacgtcggtctgtgccgatgatggtcaagggaagacccgggatgggcatctcgtcctcgggtgaaccgatcgattcttcttcgctcgtccctcccgtcccactcgtcgaggggcagtccagcgagccgaaagagtttgacgagaacgtatgtgtgtgcttgaggacccgtgtcgagtcgtcgtacccgtacgtgtgcggtaccgccgtcagactcgtatccatcaccaagtgggagtctgggcacgaggccggatgctcgacggacggtcttgcgttcgagatccctccttggccatccggacaggaaatgctcgcacttctaggccggacggttaggaacgggtgaaacctcacgactcctcctgtgagaccgatggaagactttggtctcctcaattctttcctctctgtgaacgtatctacggatcctgtcgtagagactggttctccgggatgagatggtggtcctgggtgcacagtgttcggtacgggcgagcgagtcggtgctgttctcgatcgttcggccattaacagagaagccgagccgcacgtcgtcgtggcgtccacacacgaggtgtgtgcttttaattctctacatgggatagatccagataggggtcccgttgtactcggcgtgacgaggcataacttgtccaatgaggtagacggtgacgtctctctcgcactgggtagatgggtcggtaagagcaggtcaggaggagattgcgccaacattcctgtgataatctcgtcggcgtgtcccgcagcaagatgggtaggtgcaaggagttgttgcaaagagcctcaagtttgcgagtgtaagacgatttcgataccgatgcgagccggatgtgcagtcgagggagccgcggtagtatgtcaagaagcgtctgatctgctagcaggtttcgttgacgatcgtcactccgattcagagtgtccggtaccggaagagcgatccttggtcgtccgggatctggaacgagaaggacaagatatccagggcgtgagagtacgacgtggccaagtgatgtcgtagagtttcaatcgttgtgagttgaaaagacagttgagtgatctgatgtggccaagatcgacggctcgatgttttcgggatatgaggtggatcggacgcgaccgagaccgccagaggttgaaccgatcggatagtcagagtggcacgaaagagtaagattaggaggaatcggcaagcatgtcgatggactttgggagacttggagaagacctcgacgaatcacagctatgatatcatgattgtccgagtacagataaccaacaatttggacgactattcacgactccctctgttctcgacttttcaaatgcgatgatggagaaacgaccattgattatcgactcgatgaaacgatcaagcggacgccctccctttactcgattcgatctcctggttatccatacacagagaggctttcccttacgtttcccatcataggatgtttaaataacgacgagacggtacgggggaacaggtcgaattggtttcatctcgtagagcgttcccttgccacaggggtatcacacggtctcatccgagaaccgagtgattccgcatcattcggtcgagccggtcgtcgtcgttgttaactttgtttcatcatcatcaatgtccatttagcacgcgagcatgccaacatcctttccgtattgtactccgtgtcatccaccgcccccgaaaaggagtcttttgtgccatccttcctttgaactaccgcccgcttgccggctggcatagccggtggatggacgctcctctttgattaatgacatttctgatggaacaagggggaactcgaattggcacagccttgccactcgcgtccccacgtgccagcaccccgagttttgcaatgaaacgcgaagaaatggcccagcgaggggacgagggcgtcgagatggcatgcaccgcggatgaaacccgtatcgatcgcatgtatatgggtagtttcagaagatgcaaagatgaacatcaagtcacgtaatgatctcccatttcacgccgggctgcatatcatcggatcagataccacatcactcccggacggtcactgacgaccatattgcgatggagaaaacaagaagaccgaaaaggatgataaataatgaatgaaactgtgtgtagagaaatgtagcaactaaaagaatgtgaattccgacaatcggagaccaagcaaaacatcaagcccgtaccaaactccgacctataccgggacaagagtcgtctattaaggagaaaacgtccatacatccgagacgatgtatcctacgatcttgggacgatctaagcagagttggggatgcaaagacccctttccagtttcaagccaggcgcgcaggaatagatcttgcactcgcccttcttgcatgtataacctccgagggttgcattcaggctgccgcaactatgaaaggcacgaaagcccgcgtcagcgatccacaccatcctgtccttttcgtcctcgtccgattcgatctgagctcactcgattccgacagcagaacggtcctcggcgtcctggccataggctccatagagacatccaccgcaagattcgatatcggcctgcggatcgaggcactgtgtatacgacggcgagaaattctcacgggatgagccagggatcgagggacgagcagtacagagtcacggatgtctcggactcgcctcgtaacccgtttgatcaccgggcaagttgcaagccgtcaagccttctgggcagtatctggatccattgccgatggcggagtcgatcttcatccttcgattaagaccggaagcctgggcggcgcatgcgttgtgggcatacatctagagagcgagtcggtccgtcagaagatggcgtgggatcgaaaggggcatccacgaccccccgcacaatcccgagtactcgtactcacgtaaacgcgagtcgtatcgcacaaggcccgattgctgttctctccgttcccaccgttgccgcatccgcactcaaaagccccgtccgctctctaacaggatcgaatgggacgcgagcacaaagagaatgcggtaagaactctgaagtatggatcgcctaccagcgtgagggaaacggctgtacccgtactcacaggatgccagaacgcgaagatataggttcgacaacggttgagacactcacccggggcctgcgtgactgccgtccagcctgtggaagggctgatgtttccgtagaaccgacaaaacccgccattatcaccgtatttgccaaacgtcgtagcctggaaacacgactgccactccgcgtctcggcacgtctctgcggccccgtcgttcgatatacccgcctcgatcatgaggttgctgttcacaaagctccgatcggaacagaaacatgctccaccagtcttcctatagtagacccgaggaaggccaccattttgaaaacaagcacgctgtcggagaattataggtgaaagaccgtcagccgtattttgagggccgaacggagatacgggcgatgagacccggtctcattcgcacttacctgacattggaccggtgcagcataacccgtaccaatgagattccctacgggaggtgcatcggcgtagcacccagtaaagattgagcctcgggcttcgcaggtgggtctctgagcttctactttgcttatcgagaggcagagagcaaggcagagaccgagcacaaatgttgcaggcctgagcatggtatgggagaggagattgggatcttgggggttcacaagacgtggagaggaaaggggatgggggagaagggggaggacgacggttcactatgtatcgaaacggggctcgccagtcaattgcgacatctttggctcgaggactgtcgagcctttataattcccgttgaattcgagcgtgagggtcttcaaggcggatttctcgtcgtttttcctcttgtgtgtattgtttcttatttttcctgtcgcttccctccttcatccttgttttcctcgtttgacgagacgagttcgaggcgaaacaaccctacccggtggttcgcaagtcgcaaggtggcacgagccttgtttcacggtttagagttgtttccttcttctatggaacaaggattaagatgcgatgcgttgcgatgcaatgtggaggccgaggtggcgacatggggctagatggtatcgcaaacgaccctgaaaagggcctccaggacatccgagaaaacaagatggcctgcatcttggcatgtcactaggggtggctccgatagaccacgacaaaaacgtgcacatcgaccaggtacggcgcggggcgagggtgacctgggccgtggatcttgttttggaaaataagcgtcgatatcgagtcgctagcctcggcaggacatggtgtcgcgcgtgggcaagcgcggtgagggggtgaacggtttatcaagccaaacaagctgtttcactcttcttgttctgaatgtccgacgcgagcgcgtagcgagcgagctgaatggatagatggtgattccaaaaatcgatcgaccacaaccccgttcatcatcgagggcgctcattcaccgactgactctatagacaccacgatatcccggcgatctcttgctctggtttgttgatgcaattgatggtgatgtcgtcgatgtgcatatttagaacggtgtcaagatgcaccgcggataagcttcgtatgatccggaatgcaacatgccgtcatctcatctcggctcggctttgagcgagaagtgtcccatcccatcgatctgtggatctgtggctcatggctggctttgggtcacatggggcctgtggtcgaccacaaggtcacacaaggtcacacaggagacagatcgagatactcgaacattcctcatagcagacctcagctcggttatacacatacatacattcatcaccacctcgtcacccaggatccccctctcaccataactctgcaccaccacgtcactatccaggcgcatgctaagatcgttcatatcgtctagatcgacgaccagacaattcaccaccgccgttcaccgcagcatctccactagcaccaccagcatcaccacctcgaacccgtcgaatcgtctacgaatcgacgccaacctcgtcggtacatcccgcctacgacccacactcccgatctctcctctcaagtcgacgatcatcaactcgtcgcaacaccgcaaccgctgcacttgctcacatcactcggccgcatctctcatcatggacggagtcgatcaaggtatgggcgtcatcaccggaggagtcgccaagctgcccgaccagactcaaagggacgcctacagactacccaccgaggtcactcctacgcactacgatctcgtcttcaagaccgacctcgaagggttgacgttcgagggagaagggttgatccatttgaacgtgcacgaatctacgacgtccgtccaattcaacctgaacccttccgtccagctcacccacatctcgttggagatccccggtgagaaacctatcgaatactctcccccgcgtgcgatccgacacgacgagacggacgagacccccggtcagacgaacagggagaacgaacccacgcccgtcgaatcggacctagagagcgttcaacctggtcagatcaaggtcgacaaggatcaagaacgattctcgcttggcgtccccaagggcctcctcaccgcgggtaccaagggcgtccgggtccgggccgcatggaaggatatcctcgggggtagcatgatggggtactaccgttcctctttcccccacgccgaggagggcaagaaggatacctactacgcgttgactcagttcgaacctacagcggctcgacgtgcttatccttcctgggacgagcccgcgatcaaggctacctactcgatcgccctgctcggtcgaaaggggttggtcagcctgagcaacatgcccgtcgagaccgagggcgaatgggagggctcgatcgggttcggcgagggtgtcaccctgggtgagaacctttccaagggagaggcccaggaggaaggacgaggagggtggacggtgaccaagtttgaaaagacccctctggtctcttcctacctcgtcgcgtttgcacacggaccctttgcttcgttgtcctccgagtacacttctcccctgacgggaaagaccatcccgctcaagatctacgccacgccggacctgatcggtcaggcccagttcgcgctggacgtcaagaggctggcgttgcccgtgtacgaagagatctttgacgtcccttacccgctaccaaagttggacacgctcgtcgcgcacgatttcgatgccggggcgatggagaactgggggttgatcacggggaggacgacggcttacctgtatgatcccaagaaatccagcttggccgccaaaaagaggatcatcgatgtgcagagtcacgagtgtgcgcatatgtggtttggaaacatcgtctcgtgagtccccccgccagccccgggtgacttttctttttcttttctcttcgtttcttcattgacatcgagttttgttttccgacctcgccctgataggcctaaatggtgggacgtcttgtggctgaacgaggcctttgcgactctccagggagaggtcatcatccccgataggattttccccgagttcaaggtccgaagggtgagtcgagcccgagcaggacttgcaacggttctacccgcacgagattgacaatcttgcctaccgcaccgcaggaattcttgacgacccacttgatggccgccttgtccctcgacgccgtccgatcttcccacccgatcgaggtcccctgccccgatgccaaccagatcaaccagatcttcgattcgatctcgtactcgaagggagcttcggtcctccgaatgctcgccgccgtcgtcggcgaggacaagttcctcaagggcgtatcgatctacttgaaaaagcacttgtacggcaacgcatcgaccaaggatctctgggctggtatctccgaggcttccggtgtcgacgtgacgaggatcatgaacgagtggatcttgaacgtcggattccccgtgatcagcgtcgaagaggttgacggtggcaagagcatcaaggtcacccaggataggttcttgaacactggagacgtcaagcccgaggagaacgagacgttgtggtacgtcccgctcgagctcaagacggccgtcgatggaaacgtctcggtcgatcacaaggccatcttgtcggaacgatccaagacgatcgacttgaggggagcctcggcattcaagttgaacgccgagactgtcggagtctgtgagtctttcctcccggccgcagaaaacatggcggacctagacagatactcatcgtcgtcatccgctcgccagaccgtgtctcgtactcgcccgaacgtctcgccaagctcggagaggaggccgccaaatcggacagcatcttttcagtcgaggacaggatcggtctcgtctcggacgccacgacgctcgcccgtgccggatccggcaagacgtcgggctcgctcaacctcgtctccaagctcggtggcgagaccgagtacgccgtctgggacgtcatcgccatgggtctcggcaagctcaagtcggtctggtgggaacaacccgaagaggtccgcaaggccatcgacaagtttagggtcaagctgttcaagcccatcgtcgacaggatgggattcgagtttggcgaggatgatgaccctgacactaggcagttgaggaccttggccatctcggtcgccgccggttccgaggacgccgagtgagtcgccacggcactcgtaccaggggtgtgtcgtctttgctcacgatcgaccgcctcgttcaggaccattgccgagattcagaggcgattcaagcccttcctcgagactggcgacgactcgctcatccctcctgatctccagcgatgcatgtacaccatcgtgagtcgatcagctcggtggcaacctctccgtacatggctgacctcgatttggaatccgttgaacaggccgtccgacacggaggagaagccgagtggaaaaagatccgatcgggtgagtcgggcttgtcatctgttcctcgctacgctcaacctcgaaaccatcgcgctgacccccgtctcacagtttacgactctccccctaccgcctcggccaagatcgacgccctgatgtcgttgggcgccacccagtcggacgagctcatcaaaaagacgtttaccatgttgcacgacgggagcatcaaagaccaggacgtcatgtacggctttgtcagtttgagctcgaaccgcaaggcgacgagggatgtcgccaagtacttcaaggagaactacaagactgtgagtttgaggggtttctctttgagacgcatggtacactgacccgctgatcccgggcgatgaacagatgatgaagcgattcggtgacaactttgccatgaaccggtgagtctctgtcttcggggctgattcgctcgtggggggaacgaccgagtaactgatggcgacgaccatgacgtttccggcgcgatactctagtctcgtcacctacgcctttaacagcttgaccactgagaaggatttgaaagaggtcgacgagttcttcaaggtgagcggcggggtcgcatctttgctgacgagtggagcgagaagggcctcagctgatccattgccgtgcggcttctatgatacttgttgtcgtgtaggacaaggacaactcgaaggtgagttttttcgtcatgacagacttgcgacctcgtcgttcaccgctgacgatcccgttttcttcttcttgtcgtagtacaaactctcgttggcccaggttagggacacgattatggcccagtctcactggttggtccgggacaagggcgacgtcgagcaggtaagccttatcacaccttttttcatttcttgttccctcgacgatcatcgacttggatggctgatcatgggttgtcatcgcgactacggggtgatttacagtggttgaaggacaacaagtacctttgatcgggtgacgttgtgagacgacgcggatgacaatagtagtagcaagactaggtgtgatgacagtagtagcgaaatagcaaaatagcatatcggcagatagcagcggtcttgtcacgttgcgggaatcccgagaagacgtcgagaatacgtagttggcattttgaaacgatgacatatagcatttccccccgcgatcctccgggattgaagtagttggtatgttgcaccgcggattgtgtctctgtgttgatctcgtggaagctggtactttcctctttgggagattgttaagcgcgtctcgattcggatccgctccctctttgttgatgcggtgcggggcggggcgggggggttgagcccgtacccgcttttatatttcacccactcactcacccccctcccgactttggacacgtcgaccgaccatgtcactttgggtcaaacaacattgtaaaggagaaagcgcatgttcaccgtcttaatcgcacgtttcaagtcgagaagctgaaacctcggccgcttaaccatcatcagccactcatcaccacaaggacacgatcgaaacatcgcgcttcgtcggcacatcacactgcttccatcacgaaagcgtctcccacaactccgcccgagacgacgtgggtgatcgacctcgctcgacaaacgcgaattatcactacgacctaccgtcccgtcgttaggagcgcgacttgatacctcccatcgacctatcgaccggactcgtcttccacaacaccgctcgatcctctcataaccacccgacaatcatacgcagggcaggccgtccgccccgtgtgtactgctgcgcggcatgtcggacctcgtccccgatgctctcctcgaccagtccttgatgccgagctcggaatcgaccgcgcctcgacccctagacgagcaacaccacgagccagaacaaggccaggatcatcatcatcaccatcaccaagaggaggatgaccctaataacgcgccgattcctagtttggaagggttgatccgggccgccatggacgcgccgggggctatagaggggatggacggggtagacgtcgacattggcgggcaggcgcaagatggtgatctcggtggacaagctgggatgaccttgctcgaagatcctacatcgacgacgatggcgacgacgttgatggacatgccggggtcggagcaggaggtcggccatctcggcttgcctaccgaagggtctttggtcgatacgtacatgacgaccgagctcgagcaacaagcccaggatcatcaacttcaacaacaacaacaacaacagcagcccgatcaacacgagcatcaccaccaaggagaccaggaccacgaacacgctacccaacagctcgtcgatccgagtcttggtcatccggacgaatctcatcagctcggtatcgacatgaacctcgggcacgacgtcctcatccaggccgacgaccagacccacgcgcacgtgcatgtacaggacgacgggtcgatcatcccggatgatatttcgaacatggacgtccaggctatcggagccgcgtatgatcagcctgccatggaccagcctatgatgcaggatctcgggcaggggatggaccttgagaatcagggtcagattcatcactccggaggtggagatcaagacgttcacgatccgcacgcgcacgctaccgaagaggaacaacaccaacagcaagggcaagtgcagcaagacgagcaagacgttcctgaccaaggtctccaacaagggttgacgcagcaggacgagcagatgatgcaggaccatcaggaacaagccgatcgtgaccagcaggggctgttacaccttcagatgcaggtcgaggtcggggctgagcctgtcgattatcacgagaccgcgggcgaggtgcatacggagcagggacaagccgaggatcatacccagacagcggatcaagtgatgggtagtacggctgagcaggtgtaccccggcacggaggagactggcgacctttccgagatagcggtcgcacctatcccggagatcagcgggatcgatccgaacgtcgtctccattgaaggtcaggctgagtcgagcgtgcccgccatggtatcatccacaggcgacccggctggaggagagcagacgaacgttaccgaaatccctggatcttcttcctcctccgtacccgtaccgaacctgactggcagatcagttccggggagacgtacgatctcttcctcggccttggggtcgggactgaaggtgccccctaaccaggggcaaacgctggggctgtcgcaaggacagggacaagagttgccggaagcgttggtagggaagactagggaggagattgatgatatcaaacgcaggatcgttgatcgacgtgagtctccctcttgcttatctgggcgtcacagagcattttgggggcccgagactgatctcaacccgccatcatatcgcctctagtcgagtcgctactatccgccacatcgctcccgcatgacaaacttctcttttccctctcgctgcggaatacttcaggttggatccccttgagcaccgtagccaagtaccctaaaatcaggtcgtatgcggatacgtacggtctcgcgttcgtggccgagagcgtgagggatgcaaacgattcgagggaaaacggacaggaagacgtcgtccccgtgcctcctaccgcttcctcctcccaggatggcggcgtcggcgcgtcggccaacgcggcctcgaatgaggaagaaggcaagcgagggaaaaaggtcggaccggccttcttgggtcgagggagggacgcagaattggtagtcgatagcaagggcgagagggtgaggaggaaagaggtcatcagcaaggcagataccgcgtgggatcggacggtctacgccgtgagtcgatgcgacgtctctcttgccgccctgtgtcacccagtctaacacgctcgcacgataattcgcaggaaggcttcgggatccttgatccatcgacaacgacaacgcaggacgcgatcgaagagtggtttgagcaattcgcacccatcaccgtcgtacgatttcggagagggcgggatccgttcggcgggaaagggcgaggagatttccgagtaggttcaggtcgagaacgagcgagcgtgttcgaaagtgtcagtagaagttgataagcatcgcttcgatagggttcagtattctgtgaattcaggacggtcgaaggggccgatttattcttgcggacgaaccccaagccactcttcaatggaactgagattgtggccatgttcaagtcagtctcagatccactctggccgctatcagcgctttctctcacgaagccgacgttttagggagacgtatttggaatcacggatacagcacaaagcgttgcgacactccaacgtgattccgatcgagcagatcgagcccgagagtctgcaggcgatcgacaagagtttgctgaagctgggcaacaagaaacgcaagcgggaagaggaagatgagagcgcggggcagaagcggagtgtgagtcgccgggatcgatcccttattccacatggtctcgtcattgacgtggaccttgtgcttcgacagacgatcctatacatcctcttcaacaaacacagagtgggcgtaagcagaaagacggggacagtgatgaacaagaacgaactcgtttatccagaacgggcgctgctcaagtttaccggcgctggcgagacgggagattggaagatcctcaaggttggtttctccctcgccttgcacaaaggcggataaaagttgacgcgatttcgatctcgacaccacaggaagatttggtcaacgccgaaatcgagcattcattcttgtacttgccgaggaaatcgagctttggctattttgcagcccctgaagccatcggtgacgaggtcgttgagcgattacgaaacctccatttgatcgtgggagatagcgagatcgagtgggagagggttgagggtatgtagcatgcctattgttgctatggccgcgctcgaccctgacattgattcatccccactttacaggccaagaagaacgcgatttctacgccaaaagggcgtcattccagggaaaattggctgtcaagatggctgacgagaaagagaacctcgaattggacgcggtcaaggagacgacaaaggagctccgaagtgccgggaaagaccgagcaagaggcaagagcgtgactagtgggagtggcaagaaaaaaacttcgggctcggcgtctacccatggcaattctgccagaaaagggaaatcagaggatgatggcggggcaatgttgacagaggggatgcagatggacgagtaatgtcgagaatggcgatagcaagttcagttgtatcggctcacattggccaaaaacacagttgtatcagcaaacacagccaatgagctgaacgtgatttcgatcaaacgtgcgacaatcgggtagcgaactcagcccatcacatgtatcttcgagatgaaaggaacacatttctgttcggagtcgaggtaacctatatagggcgggatctgttccgacgtgccggagtgatgttcgccatcgtagttcccctcccagacagacctcaacgaatcctatgatgactcgcccaaaccttgaacactgcaagacctgctcggcgggattgatacaccctgtctacggcgacgagggacaggcttctactacaagccggctctgtcacgagatcatcgagaggatcaacgatcttcctgcaagtccgatccatccgtttccccgactatttcatcgatactgatctatcaatttctgagcgaaggctctgcctgaacaccttgtcctgtgtactgaccacgggtcccgcgagttgaaattggtatccgagtgcacccgcaatggtggcagatggtcgacgacggacgtcatgacacgcaaagacgacggagacgcttggatgtgggacggcctcgcggaaatggaacgagcagatcaggccgatcatatcgaagagttgaaacggccgcggtggatcgatgggagagcgaagcctgtaagaggaattttgttgcatagactgccgacaggtaatgggtacgaggtggagatgctgtttgaggagcggggacaccagtaagaacgtcactctggtcaggttgagagatttcttgcgaggtccctcgttgcccctttcgttgagcctcagcaggtacgaaatgcagcggcgagctttggtatatatgtatgcgattatagctatgtctctatacaataaatggaaaacactctggacctgcttataaccggatctcggaccagatgaccggcagcaagacgacacaagccgcccagaactagattgcaagttgaacagagtgcgtcagctactgtaccgatcgtctggcaccatgtctttcaatcgctcaccacctggccgctcctgaccatgagcgcggggtaatcgccaaacccgggtctcgacgccttgctgctctcgcccctcgtgaacaagatgtagatcgagtagaaagcgaccgagaaaaagtggtaaaacagcaaaagcggctttggcgtgaggctatgcgaatgaccaaaaggtcagtcgagtgcctcggtggatcgacttcgacgagcatcctcgactcacgcggaaaggagaccgacgggtcctgcgacgcattcgcccccgagctcaaagtaggcgaaacagccatcacgtagcacggccaggttggcgtctgatcgttccggataagaatggtggggcgaccgggaatcagcctcgattcgacaccccggtgcgagcgaggccctcagacgcgtcgttgagacactcaccatcggctccaaacaggtcgtacagcgcgatactcagaatgttgaccacgctcgccacgttcttcctctcccaataccaactctgcaacctctccctgatctcttcccagtcgtgcagatcgacgagccctccgtccccttgttccttgctcggtcggaggtactttgtcaacaagaccgcatcgctgaaagccacggtcattccacccccggtgagcgggtgtcgcatgttccacgaatcgccgaccatgatgacgcccgatcgaccgttccgtctaccttgcatctttgggggcaagaagctgttgggcatcttgcggagttgatccgtggataacgcttgtcggatcggaccgcgggtcgaggggggcaagtggggcaggtacttatcctcgatgtaagactaggggggggagaggggggcgtgattggccttgccgatgagcttctcgtccctcggtactttccccagcatgaaaccgccaaaagctcaccttcatgctcccatcagcgatactgggcaaggaccccttgacgtcgaccaacaacctcgtctccctcgcctcgtccgcgatctggtacaacaagaccggtccggccggggtcaggcagacggtcccgtggtgcgctttgggtaattcgacgtccttgatgaccaggccgataaagtgcgatttcgtctttgtctcggcgacggggggtgcgacctttttcacccttgtcgtcgtcgtcctcgaggtcgagccgacaggtccggtggcggccttgcggaatttcgagaagcatccgtcggcgatgatcgtcaacggtgcgtaatagctacgcgagaccgtttccaccaccgacgggtgatcgtgatctcgttgaaccttttggttgaccgagaccccgatgaccttggtcgtatgatcgcacgtgagcaggttggccacggttccctcgaggacggtgacgttgggcgcatcgcggatgaccttttgacgtagggaatcgatgaaacgtccgtgatgaaaactcctgccctccttcttgccgctccggctccacgacttttcctctggggtgatctcatgtccctggcctacacaggcgtctagcgtggggtaagggatcgggacttccttgccctgcatgtacacgcagtatccctcgaccggggtggcgtcgatcccttcgagacaatcccccatgccgagtttcctcaaggcggcgaccccacccggttggagcagttcacctacgatccgatcgggtggtgacatgtccctttcgatgaggaggacgtggtggccggtgtgcgagagcgagtaggccagaccgcaccccgcgatcccggctccgatgatgatgatgtctggttggtccgaagcatgattcgcagcggactactcgcgaggtcgaggtcgtcggggttggaaaggtcagcttcttggtttgtctctcaaggtgacagagtcggcttaccgacatgtccttctcttgatcgacgatcaggtcgagcgatgtctttgagctcgatgcggtcgaggtcgcaaacctggacaagtcttcgatcgaattggagctcgatggtggtgagatcggcgtggccatcttgtgtgcgtgtgtgtgcgtttccacagggtttcaagcaaggataggacgagtacgtggctggagtgaggatgggattgatctatctatctatcgatcaaccaacacacatatatgtctcgataccaaactcttcatgttcgatctctctgtatatctctccgatctgacccggccggccccggtcgctcgacaaaacaaataaattggcagctggcagccacacgcgcgtcatcgtacgatcatcaaacaagcaaccaccttgccaggaccgtcgtcgcttgcgtagattattatggtgtacaaaagatgggatggaggctataatcatcatggaacaagacgtttgtgcgggaggaaggggggtggttgggttggttatctgacagttacgagtcgagggaagttgctaagaagctggacagagtgggtatacgaacgaggtgtcgtcgactgtaagtagcgttcaaagagagaggctcgaggctcgacgtttgctgtttgccttcctcgattgcttactcgggcgattttttaatccctctcggttagacttcgagagacgcccgaccctcaaggtcacacccgaagggttaattccacacgaatgtcgaccacagaggcagagttcaagcgtcgtgtattgcatctgtggttatgatcatcctcggtggctcatgtagtgtagcaagttacaagctgctagtttgtctgtgtgattcatcatcataatcatcgttgaggtcgtaaaggttttgatttggcgcggatcccattccactccgagccagtctcactccctcgcccgcgctcagcccccgccagccccgggtgactcccaacttggtaccctaccaaccaaccaccaaccaaccaccaccaacgtacaccgtcctcctcctccttgccccctcgttggtcaagctaccacgccgtaattatttactgaacatcactcacctacgttttcggtacatccacgaaacacacagatctagtcaaaatcaacctagaaccctgccacccagccacccacccacactctccctgagatagtccgggctagactctcactctacactactactactctctactattacctacgggatccccgcgcagctccgagctagaccgtcgaggtcaacggtagtgcgagggggcaaacgggcgagaaaccgtatcgagagaaacggtcctgatcgtccttctcggacatcaaactccagtcgagtcgcgattcagtacaaggaactgtcgtcagagatcgacaggacaggacgagaagagaagagaagagaagagaagagaagagaagagaagagaagagaagagaagagaagagaagagacgagacgagacgaggagcagtagtcgggtgtaggactatcgatctagagtttggtcgactagaggacgatcaggattgggttctatcatatcaaggggatccgttcggtgagtgtttcgtgtccgtgtcggtcgtgttcgtgccggtccgggtcggaaactacgggtggacggatcgggcagcgtctggggtttcttctttttcctagagatgagcctcaggtcgggtgcagcgtcggtcatcccgcccatgctcgagctcgaggtcgggtcggttggtactgcgactgaccgatgtcatatccactcgcctacagacgttattgcagtgacattgctttcgacagcgaatctaccaagatacccctctgattcaagaccgaccccgatcgagacgccggcctcaaccccggatccaccttcctcccccaccattcaacaggcaaggtttcgttcaagattccgctcgcatccccctcaccgccctatacgggcacgggcacaggaggaggagcaggagcctcttcctccacccaccgtccctcccccggtgattctacgggggccaacgccgcttcctccccggccccctcatcgggcagtacaggaacctcagggtcgaggagcacctcgacaagtaggagcggaggtaggaggttaccgaggttggcgcctagaccacccgcacccgtccagaccgtccagacgggaagtcatgcgagtggacgggtgacaggcgtcgcagggaccgcggcgggggtaagcagtcagttggcgatgaacgtcgccgctgcagccggggtgaataggggcaagtcgagaccgcaacaacagcagcagcagcatcaacaacagcaagggttcggagggccgggagcagggttcccaggctcaggggtcggacccgggtcgatgccgaggtccgggacgaacaagtcgaacgtcgctccagggatgctggatatgcagggtatcctgagcatgtcccagggtcaagggcagatgcaaccgtctcaaccctcctcgtcgtcgtcttcctcggcaatagcggcgtccatgatgaacatgcccggagggaccggctttgtccacaataacaacaacactggcaacactagcaacactggcaacaacagggcctcgtctgggttcgtgaaacccaggatctcggtagcgacgggcaacaatcaatcggggtctagaccgtccgggttcaagaggtcggcattcctaggatcggcttcagcgaacaacagcgcgtcgagttcgccaacccacgcagggttccccgtcaacggtgtgacgacgtccacgacaacgacgacgacgatgggtaaaccgggtggatcgggaggaggaggagcgggacccaatgtgaacaccatgtcgagcacgaattcgacgggattttccccccggttcgcttcccatttcgcttccccagggaacacagtgtccgagccgaacagtcgagcgcagacgcccaattacaccggcgggggagggaacgagatgcaggggaacatgtccccgccgatcaacacgtccgggtccatccccgtaggcaggtctgggtcgggcagacaagccatgcagcagcagcaacagcacgtctcgttcgaaccatcgagcgtcgggtcgacgggatcgtcctttcacccgtcgaggagcatgagaaaggggtcgatgcagcaacaccatccttactcacggtcaggatctaccacgccatcggaaccgcctccatcgccctggggaggattaaacgggagttatcctttccccggcttgaccccgctgcacgaaggcaagggtcacggtttcgcttaccacgggatgcagaatcagcacaccgcaggacatggcttttccacgtcgtcttccctcagtaacacgccgtttggaagtttcggcgctgagcaggttcacgagcaagaggacagggataggttggccgaggagaatacgtattggaacgcactcaactcgtttgcacaggaaggcgggggcggtggtctcgacaatgaaggacagtttgtcaacggaggaatgtccggcagctttgcacagaccaacagcgtaccgacgagtggagctgcgacgccgttgaacgggcaacagatgaacatggcggatctcatgtcgcccgaattcgtcgccctgttgaacagcgccgaaggggcgggattgtccgacgaagcggtcgccgccgccattcacgggttggtacagcagggaggcatgacgcagtatgcagcgcccgagctgcaaagtcgggcggcacccgccccgagcaacaacgcgtcgtcttcctctcagagcctcttgacaaggcggttgcaacaacaacaacaacaacaacaacaacaacagcagcagcaacaacaacaaccgcgacaacccttcgagcatcacgagagcgatacgaatggaccaccctttggcatgccgaatcagggcgacgcacgcaggtccagtcacgtggctggtttcgcagcggcgactcccaaccagttttcctcttcactacctgggtcgtctggtcgatcagggacgagtcagcggtcgaccggtcaatcggctggcaagactggtaccggctttgggtcgcctcagatgccctcgtctggattctcatcttcctttggctacaccccgggttcgctcgctacgaatcgctccggtggatggggtccgtcccgcggggtcagcacgcctactacaccgatgacgatcccgagctcgttgtcgacatcggtctctggaccacagcaaccgcagacaccgttccagacaggctccgttccgggatcgagtttcgggacgagcgccaagtccatgacatccaaggcgagtctgcgaaagccccgttcccattgacgaacctgtactcataatcgcgccctggcctctcttgcagacctcaaacaccgggttccgccctactaaacctcgaaaatcatccctcgcggcgcacaactacaccttttccgctccgacctcgacgacgacgtcgccgcgaccgcccaccgcatcgcgctcgaacggccggacgcccggtgagatgcccctggggacctctccagcgagtcaagtggcgttgcccgatctcccgccgttgcctgaagggttttccctcgaaaacctcgctcaattcggcagttcaggcctggagcttgccatacgtatcgggatgggaatcggtctcagtatacaacaagctcaacaacaatctgcagagggaggtggcaatcagacgtctgccctcgatgccgaatcgatgcgacgtcagttggcgcagctaatgaatcatcagggctcggtgaacgagcctctaatgtcgcccacgggtcaaggtctggccggtgacttttcgacttcgggccccaggtcggccgacgtcgtcaaggacatcctgggggaagacttcttttcagctcgccatccttcgacacctggcgcgacgcccgggctcgtcggtggaaatggcgctgcgagctctaagccgacttctcgccggacgagcaacgctggcgatcttccactcatctcacccatcgcaaactcgcccagcgattcgtcaaacttgcagtttgcagacaacgcccaagacatggccaagaaggatcctcttgcgactcaggtctggaaggcctatgccaaggccaagggcggactcccgaacggcgcacgcatggagaacttgacatggcgtatgatgcacctcaccatgaagaaaccggaggacggttccaagctgcagaatggcatggaactggtacaggaagaggacgaagcggcagaggaagctgacaagccaggcgccatggctggtgaagaggtggaacgaggtcgacgaggtcgcttcaagggcaaaggtcgagtcgtcggtttcgatgccgagagccctcagggccagcaaaacgagtgagtacaggctggatcgagggtcacatcaggaccatatacctatccttgattttcctgcagcgtcgacgccatggattggcgagctgctagtcgttctcgctcgcgtgtctcggtcatggattggagaccccagtcccgatcgcggtctcggtccacctttaaccgggtaagaaacccttacgatcacggttcggaagctcattcgcacagccttctcggtcgcgaggatgtcgtcgaaccaaacccgatgttttacgaatcgcaaatgtacaacgactttcaatcttggccgctcggtggggctagtctgcccaacctccctcataccggtttcgatataacaacaggcgacttcaagcaggagcagggtggcaaaaagtttgccaacgagtcgaccagcgcctcgtccgggccgatcggtgtaccgagatcctttgacctgaatcaagcggtccgtgctgccgccgcgtacgacgcgtttgctacatcggcttccagcgcggatgggcaacccctgcacctgtccggaaacaatccaccctcggtcttgactgcctcgcatcaaggttcgcctcgcaacaaggacaatagcgccgggctgccaggcatttcaggtcctggactttacggccagaccgaggaaaactaccacccaaagtacgggtacctacccagacgcgtacgaaagaccagcttcgaccacaccgtggaaaagggatcgtcggggtcgtctcctggattcatacctccgcccatgaccgccaagcaggctcgcaagaggcctgccgaggcttcgccgcagatactcgccaaagctcccgtgcccatgccagaagacgacgtcagtgccaactttttggactttcccacggcggactcgaccaacctgccgcctggcgagtttccgagtacggctttcaccttttcctttcctcattcgtatgacacgttctttgacatggcggcggcgaccacgaacacgccagccaacacaaacgacatgctcgactttggcgcgcagctatcggcctcgtctcccggtgacatggtcaactttgccaacgctttcggcgatggcggcctttccagcatgaccacatttgcggcttcgaatcaggctccggtcgagaccctcgcgcctggcctgttgcaaggcggtgggatcgatggcggagctcaatcatatgatggaggtgacctgcaccagggggatccgtccgtgacgttccagcagatgatgcaacaatacctcaacacgaacgccacggtgaacccattcacccacgtcaaccccgctcaggtcctcggaaatatgggtcagacctctgagagagcgatctcggtctcggttacggaatcgccgcacgccgagtcgtcgcctcacggaccgaccaagcagatgcccaggagcgtaggtggtaaatcggttccgaacaaggacgacgcccgcgcacccggtccggtccgatcaaacagctctccccacctcgccgggctcggcgtacacagcatgacggcttccgatccgtcttccaaccagatgaaaaagggaggaccgagcaatgtgacaaagtctggcaagggcggaagcaagacggggccgaacacgccctcaagtgataatgaccatggagctggatctgtcatcaccggaggcgagtcaccgatcatgtgtacaaattgccaaacgacgaatacccctttatggaggcgagatccagatggacagccgttgtgtaatgtgagtgatttttcgatgggcactcgacttgggacctaatgctaatacgcgatgcgttttgggaatgttcaggcgtgcggtctattctataagctgcacggtgtcgtccgtcctctctcgctcaaaactgacgtcatcaagaagaggtgagtcgagtatcgttcccacttgtttgcgtatgcggacggcttatgttccctttcacgtttccagaaatcgtgctgccccgggaacgaaagaagcttcgatcccgtcacgcaaaaacagcgtgacggctggtgtatcgtccaaaccgccggcgaaaaaggtacaaaagggttcgagctcgatggtggatcagttcatgagcgcatcagccccaacgaaaaaggcacgccggacttcagagctgggaccgtctaatgcctttgcggcactagcacagtttgaaccgtcgagtgccaagtagcccgtcgacccccccggtgtcgacctttccctgcccggctcacacgcatcgatattttgtatcaaagccatcatatccctcggttgagaggacccacgacaaggatttcgtattttttgctcttttaaattcttgtattaggatctgtaaacatatctagataggaccgacatgaactagtagcagtatagtgtgtatgtgtgcggtctcgtcctcgctgctcactgactatgctcacgcgacgcgtttcgacgcgtttgttcgaaagattggaacgatgacgcgtcaaacaagcagcaacccagtaggtaagtagagtaccaagtcagaggagtatagaggagacagggagttgataggaatcgacatgcaacgaacctgctccttctctctactcctcgcaagacaatattttgatcactcagcacagctaccacatctcttgttcaaacctccaagatgagttcgaacgatcccatggaccaattcttcaccgatcaagaacaggacgcttcaccctacctcctctataccgcgttgggaattccgatcacggacaaggccgaccgggaaaaggtcacccaggaagtcgtccgacgggcataccgtaaagctgccgtccgatgtcatccggacaagcattccgacaagactgaacgggaaaagcagaaatgggtggacgaatttcaaaaggtcgggttcgcctatgcagtattgagtgatgaaaagcggagggctaggtaagacactcatctttggaatcggttcgcgtgcgagtctggcgtatttgccgatcactgctgaactatcttcgtaccggacaggtatgattctactggaggaacgagtgaagccttgtttgacgacatcggcgcggggatggaatgggcggcctacttcgagagcgtattcacaaaggtggacaagaagatgctggacgaggaccgaattcgctatcagagtcagtacagtgaacctccatgcacttcttgccgcctgttctcgttgttgatgctcgccttcacaatcttcaccccgtgacagattctaaggaagaggcagacgacgtgctcgaagcgtatcgcaaagcttcaggtgatctccacgatatcatgagccggataccgcattccacgacgaaagacgagtctcgattcatcgctctcatcgaatccgagatcgaatcgggttcgatcgaacggctgaggaaatggaccgagacgagcgtcaacgtcaagggaaaacgccggcgagtcaaggtcgaatggggtgaagcgaaagaggcagaggagcacgccaagcacctgggtatctgggacgaaatgtacggggatggcaaggcacagacaaccaactctggagtcaagaaaggcgagggctcgaaagccagaggcaagcgaggcaaacgaagtcgagatgatggggacgaggacgcggacgaggccgagaacaagcccgaggtcagcggtgaccgtgacggcgatgacatgtcgggactggcggcgatgatcgccaggcggcagggagcgagggagtctgctatgaatgcgttgtttgacaagtacagccaaccgtcgggtgtcaagcggagtaagaaaaagtagcaagctcgtcgtccgaacgggtgggtcagaggtcaagtaaggaaaccggacttgcctgtcgggatgactgtcggtaggagcaacaagcacgtttcatagcctcagccggtgctcaacctttatacgtattcgtccatggggtatggttgtataccttgtacctccaaacatatacttgtaccataacttttatgcttgatcgatcgtcctcgtcctcttggtcacgagcgccgcgggggagaaaggaacccggagttgcccgtttgaggaggtcgaatcatcttcttgcttcttgaccatctctcatctcatcatcccgacacacactctactactgactgcttgaatactcctatactccttgaattcacaggctcatttgtccaagctcttactgagaggctcggattgaataccattccccagctctgacggtacgatccaatggacgccaacatggatgaggcaatgatccccgaatccgacgactcgccagatgtcgagatggacgacatctcagcctacgatgcactcgaggccctgaccaagagtctacccgtactgtatcaaccgaacccgtttcaactcagactcgtttcggaagagtgcgagcccttcgttgggcagttccgaacggtgaaacagcttcctgccatgggacttttcgtcggtggcatacacttccaactcgccgggtacattagggagcacagtaatcttccagatgaagctgcagcttggaacgagttctccaaagtcaaggttttttagaactgggcagggcttggaacaaccatccagatcctcgagtcgcccggacgtactattgcttccttattgaaaaaggttgatcaacaagctcaagatgacaactcccggacggctctcaccttcactcagaaccagatcgcctccgaccttgaacgagaatacaaggggtaagggttagagtatcttcaccgacacatctgtgctctgcagcagggcttctcctacggaaaacactacgctcgcgtcctgcctatcattcagtcttcaggcactggcaaatcgaggaccgccgttcagcttgcccaaaaagagcttggcttcttcacctgtgtcagagcgttacataacacgatagtgctcagcgactactcagtaccgagaccagcaagagatggttgggttgccgaatggcttattccattgtggagaaggggatcaccccaaggaaacagaggccctttgcatcgcgatatggctcaagtgctttgcagacggccttgcgcgatatcatgacgaaaggtgggtcgagctgttctcagaacgcatcaagagacccgtcgacatctcgcacgaggacgggaaatcccgatgggcaaggttcaaatcggttttatttcatgacttttcgcctgtggccggcaatgaagacagtcaagagaggcggacatctctactgaagtcgatcgctggaaactgtgaggaaaagttgaacaaaatcgtcgccaagagcccgtacctttcaagcagacaagaggcgctcatgacgctttattgggaaaccagagcatcttggctttacctcgagagtattctcccaaaagatggtcaggatttctttcatctggctatcgacgaatgcagtcaaatgcgcgacgaccacttggcagccctacgaggtcaattgagtaggatggaactggaacgcagttgggtgctattgatcgatacaaacgcgcaggactctaggttggcgagcaaggcgcccgcgccgcccgggcgctacttaccagaaggactgactatgtgcgaaccgttctcgaacttaccgatggacttgggtatgattggtgtcgaaggcgcgttccgcaaagtctgtgacggcacagaccgcaaacaaacccacgagaacttgaaggaatacctgccccgctggggtcgaccgttgtgggcggaatcctggcttaaggactgtgatagtcggtccttgcgctatgccggtatcagcttggaagatgtctccgacgaactttctgcaagttcgatgaaggggacaccgttcaagcgaccagaatccatcattgcgtttctgacgcagaggttgccgttgacaatacttggatttcaaggtgagttgccgtggtaatgacagtggagacgcgtcgatcatatcatggggtcgcaacaacccatgggcactggcaggaatggcccctaacaggaagttcgcggagacccttgtcaagcgtcacttactccgattggaaaggatcttgccgcatcaaggagccatcatcacgaacgctccttcagagccgattcttaggtgagtcggcttaaacttctgcgtcatggcaagccggagtcaagatgacaataccgtttaccgaaattcattacagtctagctgcagcttggcgaataaggagaaacgcttcgcagtactggaaacaagcaatcgccgctgtacatcagtgtgtggatcagtgtcaagtcgcaactggagcgtctggcgaagagtacgcgctcatcatgctatctgccgctgctgatggcgcggcgacagagtggcaggttccagacgcggacgccgatactctcaagccaatcaaagtttcactcttggctaacgacactgcttcgcggtctggacgatcaggccgaagctggcgatttccgggacatgttggcctgggctgatggttacgtcctaaatttcactcactttatcaccatggacaggaagttcgccgtcgacaagccgctgcggcaccgagatctggtaatggcatatctcaggcatgcggcaatcgcaggagcacccagtcaggagggctgggatatgctcatcccgacataccgtgatgtgccggatgcacccttcgacgccagaaacgtctcctatatcgctatacaggtcaagaataagacgcgagccgataccgcaacatggcacacggacttcgctgttggaatcgagccgttttctggagaggaagcgattccgcacatacccttgcttgtctggcttgatcttcaggcacctgagcgggaacttgacattcgtccgaaacccctgccaaaagatgtcaccaagactacacgatcaaaccctaaacccgggcgctacagtctttatgtttccggccatgctagccgcgtctacggcccattgcagaagatctcagacggcgaaggtgaaccacctacccggcatatggcagcactcattggctccatgcaaggttatggcgctacagaacgggacctgtccaacctcgaccaggaccgtgtccaggcaaacagggcgagctgtcagggtcaggtccatgctgctgactagctaactagatcgtccaacacgtcggcacgctcgacaacaaaataatgcatgaagtgggacaggtcggccatcaccgttagcgatacaatgtcgtcacctgtcatcatataaaacgttctgcaaacgcctctgatacgatggttccatttatgaagatgtaattttgacgaccgtgtgatcttaggcctccctcatgaataacgatttgacactggcttgtagacttcccgatgactcgaccaacagagcttttgcttgtgtactcgtcagcgaaaattccttgaccttttcaaggaggagcaaacacacaaagcttagctgcattgtatccgacacatttgtctgattgctgcttcggaacttgccagtacatcaatgtcttcctgcttcaatgaatcctcttttacggctcgctccctggcttccgcctgggtcttggcctcgtagatcttccttatcttttccgtatcgaggatagcttcgctcagcttggtctgactgtaactaccaccgtctgcaaactgaaggcagtccaggtagggatgagtggtccagccgggagtgaaaggatatcacgggaaggtactcgcgtccatcagtacttcgccaacggaaggtacggccggtcgtcttgttgttgtagttgatgccatgttcgttgggagcagtattcaagcaagaacctttagtataagggagacggtcgcggtcgttatagttcgggcttgggaggatctcgatcagatgaatgcacattagtagctggtggatgaccggggcccaggtcattggagtcacggtcgccgtagcgggacgtcgacgcggacatgaagaacgtgaagccatgtccgggtacttgaaagcccaggtcactctttcaatgggtagtgtccataaatgtcatctattgcagtctatcctgctagtagtagatacagtctcgagcctagatggtatgttaaagtcgaagcgcatatatggattcagacgcgatattcgtccaagtgggatctttgcggttgtctactcggccatctatacggtcacagaggcgagagcgacggccacgagaccaccgagagcgatgccaaggcacgagatggatccggccttgactcccgccgacgatcccgattgaaactgctgctgttcgcctcccgtcatgccagtcaagttttggatgaaccgaggcaactgtcccaacacgggttcgtactcttgcgtcctctcggtcgtgttgtcctgtccgttccagcaccaggtgtcaaagcacgactggcagaccgagcttcggacagctccgccttcggtggcggccctgtccatcagggcgcaagtcaaacaggtaggccagtcagacacggtcccgttcagatcgagcgatcgtcgtccattgtcgacgatggcagcagcattgtcgacggggtactcgagctgaaaggtggaagcgttcgagtagacgttccaggggtagttgggcaggtagacgatcaacggcttgtcggtctcgttgcatccgaaaaagacgggacgttcgttcaagccgtcgttgacgaaaccagtggtcgaggggacgacgggcatggtgttgtcgatctggtacgtctcggattgttgtagacccttctggtacgaggtccagagactgctaccgttgggccacgagtaggtagtgtccccgctgttgtccatggcgatgatcgcatcgacccctcgacgggagatcaagaagggttcgagcgggatgttttcattggtctatgatgcgagttgggccacagggtcagctttctttccatgtctcctcgcaagctagctagaagtgcttgcgccgcttggcacgactgacctcgcccccgtcgaccaaggtaatgttcctcagatccgagatcgggttgttatcgctctgccacccaaagaacgggttcgggtaagtggcgacgtcgttgtaagcctgtccgatctcccccagaaccgcctgaatggccgtggtaatgatgctatccgagttggattcgttgagctggaggaaagcctggttgaaaagcgtcgacgaggtacccgcgatgaaactgtcaaagaaacgtttcggaaccgggttagagggatcggaccactcgtatcgagccccgaggcgatactcacccgaggttggagaacccacgcacgcaatcgccctcttcgacgggtgcgccgttgttcaaggccgaaccgaggtattcgatgttggtgaagcctccctgcgtcttggtagaggatccccagtaccacgagccaaactcgccgagcgtaaactcccagatggtcgagttgagcgcgatgaccagctcgccaggttctctctctaacgcgacgatgatggggaagggcaacgaggcgtcctgaacggcaggctgggaacgcatgtcggtgatcgtcaagttgggagtgttgtccgggtgataaggctcggtgaagactgatacgtgcaaaacgatcccaaaaaccatggtcagtaggaagcacgactgcaaccaggggacctcgaaaagaagctcacggtggtcagacaaggccaagctccagtagtcggtgatttgagtttgataccctttgtcggccttgtcccttacctcggagatgaggttgtagtagaaagacagcttgtcatcggcggggacgacgaggttggacgagatgttccagatctgatgagcgtggacgaggtggcggggcgatgaggcggcgggagatgattaaagaggaggcaagagagatcagtcgtcttgacaaagtgcaaggtgcagacagcggggctgaaaggggagacgagatgctcacgttccgaacgagataatccggttgagctccattgttggccaaccaagtactgatcgcccaacttcctccactgagaccaccgacgtacgaagtcaaccccaagacgtcccctgcgctaccctcgctggtgttctggagaaaggcctgacctgacccatggatcatcgctcggtaccctccaccggagagagccatggcgaccttgggggtacgggagggcatggtcaacccctgggaagaagtccgggattgccaagcggaatcgatctgggattgtctctgagcgaggtaatccgtctcgatcgagctcaacgagtcggccgggcggttccaggtgatcccatcggggcaagtgacgttgtaaggagcgtacccggcagggctgtcagagtcacctccaaagatgtcacccaggagggatcgatcgccgaggacttgacgagcggtctgaccggtcgaatgggccgtctcgagtaggtcgacgagcgcacgggcttgttgaggggtgatgacatgggaaccttgagcgtcgccggccggagtggcggtggtcacgccgatgagcgagattagggcgagtgccgtcgagatgagctgcattgtgagcttgtcaagttggggaagaggaatgtgagcgtagcagagaattcagagaggttggggaggactgaaaggtggcgagtggtaactctgaataactatataggcacggctcgacgattatacgggtgtgttgacgaagacggatgtcgaagagatgtttgtcttcgtaggctgaattatatcgtgtactagcgtttttctgctcctttgatgattagaggtcgtcgtagtcagtctggttctatacaatcgctgaccatgctatgctgctacattggttgactactttttcgccatcgtcgtcgacgtcgtcgtcgtcgtcgtcgtcgtcgtcgtcgttgttatccccgtcggagggcacttttgggtgtgttttcccgggcgacgtcatccaccaactactgcaccggccaccgacagacaacccaaaacgacgtattctcggtcattgagagggcaacaagccacctccaccactacagaacagtaccaaatgcagctcgtctctgaccagaccagagccatagatcaacagcatggctatctgtttgctgctatgaggccgatttcgatctgatctctgttctcctatatcgcgggatctgtcatttctgttcacatgtcatgcgcgcttaggtcacgtcgaggtcgcccggaaatagatcccgtaggtcacaaaagacatcggcaaaaggtctgtcacaatgacgacgatgatgatacatttacattcagaggcggcacagctcataggcatagctggcacgcgattgcgactgccatcgaatcacagagcgagactcgtcccggagcgtgtattttactgactccgtagatcgccgtcggggttccaacgctctcgatcggccgtcgaaacgtggcggaccgggcactcgggtcgttcaacaggcaggagggaagagtagtatcagccagatcttcgaaccctgctcgctgtgtacggcaaattcccttttaatgtccttgcaagcgtccgtgtcggcgatcaagctggtatatcatatagaacatcgtcggtatctcaagccaataccgactactagcgaactagagtatacatgggaaagaattcccgatacctaaaagaagaatagaaatcaaaaggtaacgacagtagtggtatgccgtccactttgacaacaagaccgtcgtcaaagagggtgctttgtggctcaaagtgtgcgatggtggtacagcgggatttcctcgctaggtcgtaagagtccatactcgtcctttctcgactcgaagccgtatcgaatcgtacgtatcgttcacgttcaatatccttctcgtcgtccccctcgtcttccttgcccgagctcggccgcgttgatatgctcgcatcggcctcgactttcagagtcactcgagattcaagcctaggtggtccgagcgatggtaaccacgggcgagacccctgatggatccgaaaacacgtcgatggagacacgtccagttcagtaaacctaacccgagtgacacgtcgggatggatcagactcacaagaatcgtaatccgcctgatcgtctgcatttccgctgacacgcagagcgcggaccaagactagcaatccaaagacaagcggggcgcgaccggtcagtcacaatcccgcatctagggagaaggaaaggaagaagccctagcactcacgtcggtaactcccatcggtgacagcggtggcattggaatacgtcccgttgaaagcgtacatctcgatcccgttgccatcctgaccgtccgagctatcgagacaatcaagtcgaacgagatgggtcagcgagcacgtccttactgatgaagggggaaaaagccccccgaggcgcgacctgactcacttgcgaggaatgtacacccgctcgtagacgttgcccacgatcgaggtatcgtcgtagttcacacccgaagccggtccgtcttgttgcccgttccagttccaccagctcagaggtccagccccatggtgcttgcccttggggcccttgcccttaggtcccttgccgggtttcggcttgggttgaggaccttgagaggtaggcgggatagagtaggtaggcgaatcgatcgttggtttaaaggcgagcggttgatccggattgatcaggtcgacggtgagcaagggcgaaccgacccatagcctatcgagcaaggacaacgagagttcaaatttggcctggagatcccggctgttcactgacgactcacctgtacatcaaggtcggggcgtcggtgcccgcgaaggtatacgacttgggtcccgtctgtacgctggcgttggcgtcgaccaagttgggcaaggcatccccaccggtaaacgtcgtcgacgagtccagcacggggaatgatttcatgctcgcggctacaccgaggtaaggaacttgaacctggtactgcccgttacccgcctcgatctggacaaatccagagtagacggggagtcgtcgctcgtccagcccgctgggaagttcgaatttcacgacgaccgtcttgctctgaccaggtttgaggttgaggacgggaggaacaaacttgactcgggcggcattgtcgacgaggggaaccggcgcgagttcgctctcgtacgagccctgtgagcgacgcgaggacgagcgtcagtcgtcaatgcgcacattccgagggggaaacccgactcacctgcttgaacgaatacgcggtctgggccggcgtgtgcgagagggtaaacttgagtctgtccttgccggtgttgacgacgtcaaacgtttggtaatcggcaaagtgtgcggtatcgttcaataagagctcggacttggacacctcgatcggggtgtgaatggcgtcgtatgcctggacgagaccggctccggcgagggcgagcgtgttcagcctcgagtcggacttgctcacgggcaacgggttcgaggtgatctccaaggcgcgggtgatctctcgggcggtgattccggacgaggttcgacctccgttggcagagaggtagagcgcggctacaccggcgacgtaagcgcaactgtagctggtacctcccgaagccccgaatccggaagcggtgggtgcggtcgagacgatattgttacccggagcgacgagttgaggtttcatgtacaggtcgttggtaggccccagcgcggatccgaggctgaccagtccaccggtgacggtattggcgacggcgttgggagcaaaggcgaacgtacccgtgggtcggttaccctgagcgatatgttgtaaaatctcttgaccgtcggcgtagctcacgacacccaattggaacccgaatcgaggaggcaagaccccctcggctccttgtgagaggacgagcaaggccctctgcacaccggcctcggccaaggcgcttccctgggtataaatgtcacaaccagccgccgtggattgctggtagacgaggaccgtggtgctgaaatcgatcccggcgaaatcggcagggacgggacaaccgtcgttctgactcgcggcgccgttggtgaacgagaccaaggggaacgtacccggtccgaggttgtccaaaccgatgtactgcagaggttgtcgacggaaagacaaggtcgcgttctgaccggggaagttgacattatccaccgaacccacgctgaggacgtccacgccggtccccggggattcggtgtagaacgtccctgcatacccaccgttcccggcggaagccatgacagagaccccacgagcggcgatcctgctcccgatcacgctcagcatggaccccgtccacgagctcgtctcaccgagggacaagttgataatgtcgttgccatcggtaaaggcgtcctgcatcgccttggcgacgatatcgttggtggtagcgctgtaacaactaaagacccggtaggcgtagatggaactccccggtgcgacgccagagacgttgtaccggttgggcaactgagcaccgacgatccccgtgacaaacgtgccgtgtccggtacaatccatgggatcatcatcaggagccaacccgttgacgccatcgaactcgtccccgacataatccctacccccggcgatgagacaaccgggtccgaaacatcccccgagggccgggttgtcgtaaaacactccgctatcgatgacggcgatcttgacaccctgaccggtgttaccctcggcgtgcaccctgtcgacacccgagatgggaaggaacccgtacccattcggtacctgagcttgaggctgggcggtattgttcgtcacggcagaaggagcggggacggccgtcgaactgctcgtcgacgtggacgtggtcgaatgcttgtcgttcttgcgtcgctcgagcaaaacgtcctcgaacgcccgtttcgtaccggcccgtgcgaggttctcgacgttccattcggggtggtagcccgtcttctggctctccccccaggacgaggtaaaggcgagcggggcgggtacgtagctgacaggccagatggcctagaacattcagctggtcagcgcaggcccatcagggataggtctcgtccgcgggctatatgctcaccgagatcccagccatcccagcaagcgtatcataatcctatccggccacaaacgtccatcgatcgtcaacatctcgtccatccaactcgaccgctcactctccattcctcgccctcgcatccggggactctggacgagactcacactcgaatcggctagcccgacactggctccgacgaacagatcagagtcgtacgtctgagctacatcgtacttgacacccctggctcggagctgagcgtagatgtggtcatgcaactatggccatacggagccggggaagacaatcgagaggaacaggccaggggaaaaatcacgcgtcagttccagagcccgatgggagagagatggatggcactacatcccccccccgcctttccccggatactttttcgtttcgagcacggattgcaacgtctgaaatttcctagagcagtaagctctgtcgctcgatcaggatatgacctcgttgcggtaaggtgatctttcaggggaggctttcttccccgggtcttcggacctgtcttttcaccgcggatgtgaccggccccggcgtttctcgaccctttttccccatcccccatacaatcagctcgaggcgtttttttcttcgcgatgatccaggtggacgatacgatacccggttgtctggagatgatatacttgaagcatgatgacctgttcgctgtaactagatacgattctcattcatctgtaccgtttcgaattcaaccagaactgtctcttctccctctctgcctctcttcgaaatagacccggcacgtgactttcctacggatcacacgacaaaagaacaactagaacgtcgatcaaccaaaagacaacaagccagccacgctccctttgaccatcctccccgacgtcatcctctctagaccgaacctcacgctccatccgatcatccatcaaaagagagattgatacgtttcaagtccatcaacacgttcggcttgtctcttccatcaatcaaatcaaccactctccctttgtccctttgtccttgctttcctttgggatcgcccgatcacgttcctttctatctttgtgagccccgtcgccgtaagtcatccggtcactatccgttcgtaagtaatttcccagtatctcgtctctggtccgatcgagtatctggactaacctcgtcttcaaatcatgtcttcggacctttgcccttcacgtacaatctcaacctgaacgaccccttaccttggacacttccgaccttgactttgcaactgtgctagacgcatcacaagcaacattcactgacctccattcggaccaaccactcgaccactctccacaacctggaccgactctccctttgatccatctcgatctttcgacacacactcgctctcacgcaaccaccgtcgttcacaccacacatacataaacccaaaccaactcgtcacaatgatgtcgtttaccaccacctttgtcgccctcgctgcgctcgcttccaccgccttggcccttcccgtccctgcagctcatcagaatgagaagcgttactccggggtccgtatgacctactacgacacctcggtcggactcggtgcatgcggaaacttgaaccagaacagcgcttggaccgtcgctctcaacgccgcccagtttgggaacagttacccttcctctgaatgtggaaagactatcaccatcagttacggaggcaagacggcccaggcggtcatccaggattcgtgccctggttgtccctatggaggactcgacctcagtcctagcttgttccagcacttcaccgtgagtagtcagcccagatcgagtgaggtcgtatgtgggatcactaatcgacgtcacgtttccatgatgcaggacctcggcaccggtgtcatctcggccgattgggactatggtagcggcgctcctgctccggcgcctgctcctgagcctaccaccacctgggtgagtccaggacctgggaattcggaaagcgtctatcgagcagaaactgatggcaccttttggtaccctctgcagcacgcgcctacttccacttgggtcgcacctactacctcgtggacccccgagccctcgaccagcagtacccctccccctgctcctacgaccacctggactgtaagtacaccctctaagccaggttgtacgcggcagatcgctaactacgtaccaattttcagccccctaccacctcggctgctcctgcgacgtcttccaccccggctcccagctcgtcggctcctgctagctccgtagccgcctcgtcttcgtccgtcgcggcgtcggcatcgtcctctgcggcctcgtcgaccgcctcggcgactgctacgaacagcgaatctcttctcgccgccctcatgtcgaccccgaccgggtccgctacggcttcgtcctcggcaactccttcgggtagcgctgggtccgacaccgaacagggagacggatcggatggcaacttgcagatgctcagcaatgttattgtcaacatgggcaggctggtcgtcatggccgcctagttcgagattcttccaagatttttcaaaccgatcgactcatggtggtcaatttcaacaacaacaatatatccttcgattacgactcgacgcaccggacaccactatatacctcataaatcactattaccaccacactggacgtcataatctgtatcgaccactccacctgtcccggaaccttttctgggtgcacacatcgagctcggaccgacgctcgaattaggcaggcttgctgtaatcgaccgtctgcccgagtccgtttgtcaaccacttggcgacagcatcgctttaccacactgtcttttacaccgggtctgcgggctttattttcactttacgctttctctttttgggctgtagttttgggtcctccttgtgggagagcaccgttgtcattctttattagattctatactgtgtatagatcaattccagaataaaagagctcgtttacatacatctccctgattgactgaatagaccatttccgaggtggtttgttgactttttgacgcaggttgatgcgattcgggcagtttcgtcatacctgtcaacccaaccgaattgtgtctctatagatctctagatctatcatgatggcccatgcatttatgttctctcttctctcttcatctgacctgatcgttcaacctgtactagggagcgttgctcttaaggctctcaaaattgagccgggtgactcgcccaccatgccgaacctgggcgtgatcggacgaaagatcaacgcccgagaagccgatcctaatccgtaagtcctctctcaaatatctcatcgaatcagcaagccgtttaaatcctctatcaacgcttggaaaaaaaagtcatattctcttcactagcgttctagacaagaagcccaatgcagaggtttgtgatcgagcagaaatcaaaggaggaaagcctcagatcaagctgattctctctcccactcgacagcaagctctgcggatcatgaaagccttggcggcgcaagtcagacctttgatgcaacgacatggagtcaaagtcaattcgttcgaggaggtaagcgtccttcattgattcccttgggcaagtcattgctcacacattccccccgctagtacccgttcaacaaggtctttgcaggaagaaactggaacgcaggcgaagtcgtcgagatcgtcctccggaggccggacaattcgttcttgccgatgaattacttggagcgtactttgacacacgagctcgctcattgccatcagatgaatcatgggcccgatttccaggtgagcagaccgtcggctctgccagctcgaatgcgcaggcttaagtgactcgtccgtcgaaaataggctttatggagtcggctccagggagaagtttacaagttgcagcacgatggatacttcggagacggtgagatatgctcaaagccgatcaacccatataccggctgagaattggtgaatatcaggtttctacagcgaaggacgacgtctaggcgattcggtccccatttcatcctccgatcgggcaggaggcctggtcccggaattggtatgcggaggggcgaaccaacgggccgcgccgagtagggcctcgagagggtatggaggaggtgcgaaaagacgacgcggacaagctcttgtgaatggtgtcgcatcgaccagttcgggcgcacagacggctaaaaagaggaagacatctaggtaagagacgctacaacgatgagtcttttaccagtccagctgataagccggattttagagcaaacaaaagagcctttgaagacaaggaaggtggaaacagactggacgggctgaacggtatgaaatccggtacccctccctgctcggtcaggccgcttacaagcgtttcacatgaacagaccccgatctcccagacgtcaagacgatcagagcacgagtcaatgcagccgccaaggctctgcagctcgcagatggaggtagcttggcggcggcgaaaagagcggcggtgtctaatatgagcgatgtggaacgagagatcctggagggcacctttgtcggaaagcggtatgtctcaatggaccgatcggctccgctcggtaagactgctgctgagataagactctgggccgttcctacagtgcgagaacgaaaaggtatgtcatcgctgacagcctatcaggtaactgaaatctgatctccgatcttacttcggtagcgcggctgaattgcgagccgaggcggcggaaagaaggatcaaagctttgactcaaccgcagtcgtcaactcgagcaaaaatcgaattttccgaggaggaacagactgacgctgaagacgaggacatagacgaaccggagaactcgaaggaagccgaatttggaccggatgcggttaggaccatgatcagcaagctaagcgaggaagaacgatatgcgatgaagggcgacgtgaaagaggagccggtcagcactaagaccgaagacatgggaccgtgcggttcggctgctgtgagttagcgagcctgttctgggttcgaagagaaaaggcgttgaccttagatcgccctgtgttcagccgagcctcgcaccgaaaaggagtcttccgcccgtgttcgaacgagactttgcgactgccaacatatcaacgcgactcatcgtcccgctaccgaatgattcctcaagcaaatcacatcccactttaagacctcttcctccactcggaacccatcgtacgcccggattttcggccaggaatctcgttgaaaaagaaaatgctagattacgattacaacagccaggtcacactctccacagccgaccccaagatgcacgcttctggaaatgcgaccgctgcggagagaattcgcatcaagattatggactctgcgcatcagaaggttgttcgggcgtcaatcccgaccgagccggatctaccagccgaagcaaccaaccaccttccccgatcgccatctcggatgatgacgagtggtaggctttggaccaaacatagactgtttaccaaaatcacgacccttaacgaacacgagcgatctttctgctctcgctacgtcctttgccttcttcaagcatgaatatctaacatgcatgtcatttacgtatacatgagtatagtgtacgcaatatcgctccgaggcgtatcgacacgaatgttgtgacgccgcaagcttcctctagcccgttcggcacatctacatgatcacacaatccttcttatccttcttgtccttcttctttccctcgtccggtctggctcgattctgtgcagatggatccatccggacacgccgccttcgctcttcttgatcatgttgtctcgcagcattgccgtcctcctcgtcctgcaacgcagccgccaactgcctgtccgcactgtcgtcaacgatccgatcctgctgtcgagcgttgatcaaggcgtgttcggcgtccaaccctgcaaaatcgcccccagctgcacccgcaggccggaattcgctgctgtagaagccagagccgctgttgtccacatcgacgatgctctcccaagtgatctcgggctcttttcggaaagctgagtcggtgacgagttgaaaaaggataggcgcatcggtcgggtctccggaatcaggttgcgggtcgtatcggcggtacaagaccgaaagatgcgagttgcggaagaactgtaggacatagatgatctgtgcgtcagtcaattgtctttggccagcagacagtggtacagctcacggcgacgacagatcctggttccaaagcggagagagcgaacagtccagggtacgtaagttgtgatgagctgctttgcaagaacgcttgcaggtgttgtgctaaagttgtcgaaacatgcgccaactcagcgggcgtgtaagcagcggactatccggtcttgcggcttacaatcgttgatcgcctgctgatcctcttctgacagatgggtctcctttccttcactgatccccaccgctctggtctcggcctccaaacccgccacaatcctttcctgagcaccttcgtacgatcccgcccgttgcaaagcctcatactcgtcctgcaacccttcatcggctagccagccgtgaacgagatcgacaccagcgaaattgaagaccgaaagttctccgctatctcgagccgagatgcccttgaacttgctgatccggtcaaaagcgacatctacatccaggccttgagtcattgttggcaagatggacaaggcggattcgagggtgagtaccgagttgtcgttcggacgagtgaccaggaaatcagcgatgaggagagacagctgatcgtaggtgatcgatgtggttttcgaggatatgtgaatggatcctcgaagtaggagacaatttgccaacgcgagtaagctacagggtccatttgcattctgcaaggcaactcgaaacgatgggttgagctatgttgctttcaagtgaactgcacagcaatttacctggatcaatactttcacgttgcgtctatacattcccccagcccgtacgtcgggccacaggccaatgtccttcaacttccaaacacccgctcccatctcaggaattggagtgggagccttgttggtctccaatgggtaaggcacaagcagtggttctgcatcatcaggcttcgaacgatcggggttgtccgaatctgatgcaggtgacgctgtcgtattcagtgattcggaggtagccggctcctcagcaggcttgttagctcgcctaggttgcaggaattgagtgtcagacatattgccttctgtgacttcgtcttatgtgaccgtgaacctgacctttatcgagcattcgatagatcgagtctgcttgatgtccatcaattgagacctggctgattgcaggtcgcgtcatcggccgccgccgaaatcatgttttgcttccggaccgcacttccgatatgcacagcacgccctctccaggttgatcagactgagcgctgaacatggcaattctcctgtactcgctacgcggcacatgatccttgaaatcgtgctgatgttgattttcaaccacacccatctgatcggagccgcgcgaagttgttggtctaccgagacataatgcaatcgatcgacttgcagcgtttgacacagaacaatcaggatggcgcgctcgagctcgctgccatcgaggtgtgctacacttggctaatatttccggcttcagagaggtcgcgaagtctggtttgttagtcaacagctggcaatatcggccaaagactatgctacgctgtccggagcggagtaagagacctgccaacttcgccgaacttccaaagcggaaagtggagcttcagcgatccaaacccgcgcagcagtcgtccggacaccctgtcgaatgaccataagcgacctcggtctgcgtggtcgttgcacagtccgggccgcacgatttgccatttctggtccgaatcagcccgagtcctttcacggtctcggacgggcatcttggtcgcagtatcggctgatgaccccacaattttctccacacatctacgatatctggtcgctccgacaagtcgacacgcgtagacctgccacgcgctttgcttcccgaggaaccttgttgaataaagctcggctagagagcatcctacatcgagatatcatcacaggcttgcctaatgaccacgtcattcacagcttggcgaacgaaaagtcggcagacagcatgagcaataaggtcctcggcaagccttcggtaccaacatgtcatcccgtatgccgaccgatgacaccggtacttggctcctgatacagtcgtccgacattcgaaagccacctgttcgtccacgtcgggctggctggcctaccatgacgtcctcagatgtgcgatattcgcttgacctgttcggcctgcaaatgctcaagtccgcacacaaggtagtcatcaacgacgtcggctccaacatccgtccaaggcgtctttttaagtcggccaggtcgccaatagccaagccggacggacattcgtatctcgatgcagcaatgtattcgcctcgtttgccgctaccgatatcgagtgcactaaactcggacccatcgatgcaccggcggcaaaagaaagggacatgaaggtcagatgaaaagcgccttgtaaaatgtcacgtacgcgctggggtttctagctcgacacagttcatgatatcgtctattgtcggtgccttcctcgtctctacctggatcagggtattcaaccagaagtaatcttccgaggttgacacgtgcgacgtatcggtcgttgccattcccatgctgcaggcctggaatgtcatgaacatgctggttttgcatgcgggaagcgaaggactgtggcttgccgaggtgggtcatcctcggagacgccacatttagggacgctgagacattatcaggtccgcgtgaaagggcctagggtctctgtagattggatctgagcgagggcgcagcgtccagcgaggcaggccagcacaatgagctcgtggtcctcgtgatccacattgacctacatgccctatcgcttcgtgtaatcagccaacaacgctcgagagctagcgaatttctttgccatgcactgtctcacaaaagaaatttcggcaatcggcactcgttccagtaactgagcggcactgccatatcccccgatcgggagcagagtcagtcacctatgatagaagaagctccatcgccgaccggtcagagagacaatatcttcttaatcccctgatcggcatggctggtaatttcggagactggaacatgcctccgacgatgcgtggcccgggccactcatcaaatgaccacgagatgaatagtctcggcgccactcacctttttacgacagtcactcgcgtcgcgtacctgatgagtgattgatcggaacggaaaaacctcgtggcgaacgtgatcgcgcgggaggggggctcaaagggcgaagaagaggagcaatgccggcatcatccgatttgtcacgagggtccggtttcactcgtctcatccgacttccgaaacctcccagagcgccgtggcggggaaccgatgcccacctccgaggagcggaatgcttaaacagtcatctagccctggaataccattactatccactcatcaccggagagcttcgcttggggtggagggcatcagaacgcgttctttgtagttcactaagcgagaatgactctcgcagaatcatgactttcgtagcggcagtgggcccacagcaagcggcatgcaccattgtactgctcatcatggccctgatcgagctcaagccctggtttcaggtcatcagctcctaggtccaaggtcagattagcaggtcggagtcgctaccacgctcgtcttcgccgaaggacgatccgaatgtgctatcgctgtatcagggtcagggaatgtctcttgttcgggtcggtgtcgacaaaagaggaagtcgagcacgtcgttccacgccaaggcgagatgtcagatcggaatgtcagggcgattagtgtgcttttccattgtgtcactcattgccacctttgtcttggttgtgttcactcggatgtgtgttctcctttggcgagtatatagtcggaggggtgatcgagggagttgaccttttcattcttgtcactctgagaatccatcctctttactcgatcattcgacagcttcaacctcgaccttcgcttagctatcacactcgcacccacacctagtccttgacgccctcggtccatacatcagatcttctcgcttctcaaccaccccttccggaccgactcaccaagaccacctccgatatgcgtttcgctaccctattcacagcctttattgctgccgcctcctcagctttggcggtctcggttcagccccgagatggctcaactatcgagatgagcccccgaaacttgcacgagttcgcccctcgtcaagtggttgccggatccgtttgcgctaccgtaggacccgtcattgtagcctttatcgaggttgtcccagtgagttttgttcgcgagtcggagacgtctgcttactggccggcactgacacagacccggcccccctttgtagcgtatttgtctctgtaccgaagccggtgtcttgactcctgagtccttggctcgtttgacggctcaggtcacgctcgtccagggtcaaaactctatcgttctcggactcctcggaccgcttctcagggggatcgtcactactttgactggcaacgtgagtcccgtcgacgtgttttctatcagagactaggccttgaactgagcatgtggaaattaccaggttgcctctactcccgcgacttgcaactaccccgccaactccttccctctttgcacgaacaacgcgcctggcggttgcaactttggctgcgacaacggcttcttccgatgcaatggagcttgccgtcccaacggtgaggtatgccccaccagctctagaaagcgagaccaaacctccgccaggatctgtcccgaaaactggatcgcctgccccgtccagaacggcaagcacaccgcttgggagtgcgtgaacgctcagaacgacctagagtcgtgtggtggctgcgccgccatcggccaaggaaccgactgcaccgctctgccaggagtcgatgatgtttcggtgagctcacgtcttctcgctgccagccccgaggtaccgatctgactgtctcaatcctcatctgcagtgcgttgctggtaaatgccaagcctcgtcgtgtctccgaggatacgttgccaacggaaccgagtgctcccctctcgatgccctcaagccccgccgaatcactctcctccagtaaacagccgagcctggtgcctagtctcgaaaactctccctctctctctggggtttgatatccctacgaacactttctcaatttatagtcgatctccaattcactcgagtcctttagccgggtcgaggtttcgccgcctcatagactcgctttctctgtactcctttttcgatctcataatagaagcgcctcgctttgggcccatccatgcatctgtacttgctttagtctctgttgagatatacaatcaatggagttctttgcttcatcgcgaagaatgacattcgtgatctcaagttgagctgacaagctggaatgcgacagtcgtgcgtagcggtgatacaatatggtcggaagatgttcggtagtcggacgacccacgatacgacatgtgctttaagatgagttgtggattgaaaagaggacggaagggaggaacggtacgagtctagcttttagatctggtggagaacacctcttctaactcgactccagtcagcgatttcattcgcgagattgaatgagacgagacaccgagatccgactcacgggtgcatcggagcgtggacgcccaacaagctcgctcagcgcagccgggtcctcttaaccctagagcgttcgtcagggagtaactcatgaccggctttctgtccgtaccactgattcccgtggcgagacgactctctgttctccttgcccatatccggggaagactctttcgcgagcttgagcgtcttcaccttgttcttgagatacttcaactcggccttgacgcgtcgaatttcctcttcgacgtcttccaacctctttccctgcgcttcagccttgtcaaacaactttcggcacatcgccccttgctcctcgttgatctgtcgcaactcggcgatctccctgtgcccctggtccatatccatgtccgcgggttcctgccaaacccgagggatccgcatcaagagcgcttctttgtcgctcttcctcaacgactcccacgtaaagtaatagaccgtctgctcgaatgggagcgaatactcgcattcgggatcatgggccagcttgtcaccccttttcaactgtccgcagcgaaagcagacaaagtccctcttctgtgagagtccgttccagacgttcgtggagaacgggacagaagccgggtggagcggaagggcatcgacctcgagcatgtacttttccaacgggcctcgctgggtccctccgaaaggtctttgagcggggagcgtaatgttcgcccttggatgatacttgtcaaagtatttctgagccttggcgcaccaattggcatagtcttgctgccagaggtgacgattgtggtcggtgtaacagtgtttgagagggacaaagtgtttgggaaggtctggctcggcgatcgaagtaggacgagggaacagcatcgaggagacggcttgttcctcctccgcgatctctcgagtgagccagcgagcgaattgactgctctcgggcgagaagaacgatccatacggatcaaacgaggattccggagtcgggggaacgacgttgatgacgggaagtcgaagtgaattaggtccagtgacgagcgggcgagccagggaaggtccttccgaagaagctcggggaagaggaggtgaatactctcgcctgcgccggattggcagcatgagctcgtcatcgagacgacaaagtgtccccgtggtacttacttgatcagcgacaatcgatcagcatggggccgagggggcgaagactgggaagccattttggtcctgtagtttgatgaatatctcagtggcagtggtagagatatgtgacaattcagctaccttcgaaataatacgagtattgaggcgtcgatgaaaaggacgaagtctttcgagctataggaagatcgatgtggttgtgacggaccactctcatactctcaggatatgtacatggcaaggatcgaaaggatgattgggtcgatcctcatctacctacagcccagtccaaccaccgtgataagctttcgttggacctgaacgcatccgatgcaccaaaggagactcggacccgtatccccgttgacaacgatcaggacacgcgctcatcgcgaccctctcttgccttgaaccgagattgttctttctccttcacacaaagatctgcgagacacagcaaattcccaccttgaaaatcgcccgaaacccgatctcatcaaagatacctacctgcctttcatcacgcggccccctcgccctccccccgcgtttcaggcttctttgtccttcctccgcgcggtcgctaggatttcgcgcgctatcagagtggatcatcgctttcccaaccgaaatgatcgagaaaacccccgctcattgcggtgccgagttgacttgtctcaaaggagaaagaaggtcgcttttccccattttttcccggtcatggacacagcccgagcatcatccggttattaccgggaaatcggtcgcgtgagcgtttcatctgtctctgcaaagaaagcgcgccacatgcttctcagtgaacaatattcacaggtaattcagtctttcagatatcggaagacaagggcacctgctgtgttcgtaaggtatgtcgatgtcaacgtgtgcccaatgctcgcagtcgatcaagcggtgcaataccatcgcagcgacgtagttccgaacggttaaatgtcagcgggagatggaatcgtgatcgacgaattcgagccttttgtttgtgcccgtcacttcccggagatgaatgcaactaggcgaactgagactctgcgatatcttcctcttcccccagccgttacatatcttgtgctgaccgaagctggaaatgatttcgcgacaacacgccccaatattgcttcattggcaatacggtccggctgtcaaggatcgagacaatcatgacagcgttttcggcagtattcgacgtcggagacgcaaaataatggcatcatacgcggtcatgccatttgccagcatcacgtcatgtagtgcccaagcggtgacgtcgcctgagatgcagcttgacgataaagaatccggttccctgtctccctcgatcgcctgcatcgatgaccgagtatcgtccacaatcgtattgagccacaatcattcgttgaccatgatattgacgcgatccaggtggatgtacaactctgcgttcgataccgctcaaccctttgctctcgtcgacgggtctcacagcacccgcttcaataccttgacgatctcttcgacctctttcgcggtattataatgtgccaagctgattctaaccacgccatcgctctcgggttcgggcaaccaggaatcgcctttctccgctgcgtagccttgttcgggggcggtagattcctgtccgagcggaaggcagggcaagatccggggagcgtagaaatgcccgtacttgatgccgatctgcgagagtgaagaaattccggtaggcgtgaatgttaagcggggcatgcaagtcatagattcgggtacaggacaacctacttttttctcctcgtcaaacaccttgacgatatccgcgctctgcatcctcttcctgtatttccccccattcgtctcctcgacgaccacgaaactgatcgttggagctctatccactgtgctctccggaccaacgatccgtacacccttggcgcgcccttcttccccggtcagatagctcaagaggatctcggataatccttcttcatatcgtcctatcctctcgtaagcccgttccaccaatgtcctctcgtcaagcgacttaagctcggattccgacagcccagctgaacccatgtcggtcaggtatggcaagatggcggaacaaccaacttgaagctcatacggtgcaccaccgggtgcgagcatatgaccaggatccgtcgggtggaaataatggccgagcgttcctagccggaaggaggtcatcggggacgaacgggagatcaccaaagctgatagatgaggaccaaaaagctacgtgaagagtatcagctcgattgttagagccgacggcgaacatggcgacggaaggaggactcactttgtaatgactgaagaacaccgcgtcgcacccccagaccttcatgtccatcttttcgtgcgggcaagctgccacacaatctactaccgtcatacccctccctcctgtacgcgttttgacgaccttgaccgcctcggcaacgttggtggcatgtccgaggagattactcttggccgtgaacgcgaccaaccgggtacggccgttgacgattgaaggcagctgggcggggtcgaggtgtaggctgaatggattcgaaggatcgatcggagtcggaagccagtatcgaattgtcaggttgagttgctttgccagccggccccatggaccgacattggctgtggacaagggaaatcagacatgaagtgatcggtaaccgtgtgatgcgctcagaactgaccctcatgatccgcagcggtcaccacgatctcgtctcccaattcaaagagtccctccagtttgcccttgattccgcaagcctgagccagattcgtagccagctgagtggttgagcttcccaacacgacctgcccatctccgccctcgacgttggtcaggatcgccgtcgctcgcctggcaccttcgaccctctcgcccgcatcggccgaatgagggtagcctcctccgagttggacgtttgaggagacgaggtagtccgagatgagatccaatgaggactgcaggatctgggagcctccagcgttgtcggcaaacacaaaatcggggtatttcgccagggcgggaaagtgaggtcggacctcggtctctgggtcgaggggcggcaagggggacatgttcactgaagctgaagctatcaatgacttcgtagcgccgattgcattacgctgccgtcgattgtacacgcaggtatatataggaggaacaagtcaagtgagaattgcaacatgtggcacctgctgtcgatcgagtgagcggcatcggagttgaccgaaaacgacgtttacgaacgtcatcggatgaccatatcgacacatccaaagcatgataccttgttgtactctgtactaccgccaagaggttgtaggagaatgcggattggcaacatcatgcggtctttcctttttgaaactacgcctctttggtcgcatccggttgcgacgtgatacaatcatgaaatacagtcatccgtcactctaccttcccgaggtcaccttgccccgctagacaaacgcgggtctaacatccatcccggccgaaatcgctccctccttgttgtttctcctttcgcagctcttccatctcgccaggctcgaccccgtggatatgaatcttgacctcacgagcgtccctacgttcgctcatgatccgctccctgacttgggactcgatgtcgtgcgattctcggaccgaaatatcgggcgagacgaggatggtcaagtcgatggacgacaggcctgtggcgacgaaggatttggtcagcgcgacggtagacacggggaaaactcgatagagagagccctcgacgcacctccgctcttgacggctcggacgttcctgacgcccagcaagccgccctgggtgatgtccttgttgacaagaggcttgacgacgcctacgatcgcgtccctcgtcgccgcgtccacgcccttgtccagcatctcgagcgccgccactctggaaagggagagaccttgctgaaggatgaaaaaggagacggcgagacctccgagcgggtcgagcacgggcgcaccggcagccgaaccgaggatcgaacagagagccacacccgaggttaaagcgtccgaccggtggctatcaacggggtgttttcggatcagcctcgacgatcccagtttcctgaccaacagcgagaccaggctcgaactcactgcacggcgttggccagcaagactgggctgtgctcctcgtccgccacgcgtttagtcgctctgtacaaccattccttgacgacaacgctcatcagggcgaaccaagccgcatgtgggttcaaaacgcttccatgctcgtgttcatgggccagagcgtcctccaacccgaccccacccggagcggcagcgtggatggcctcgtgcgcgtgcgagacgttggcgtgcgtcgaatgatcgtggaacaattcgagcaagggggaagggatcgatttgggtaggtaagggacgatctgtgcgaacgggctcgacggatccagcgagtcgaggtaggggagcatgacttgcaagagcaactggtgggtgtttcctcgaatcagcgacggagatcggacgcgctcttcatgcaggggtggacgagacctacgtggtacgagtgaagaccgatcccgatggccccgccgacgaggatcaagctgacccccaaagtcccgaccgtctcaaacttgccgtatccccagggatactcggccgaaggtggtctcctcgagatcttccatgtggccagggtcacaaagtcctagatcgaagcgacatggtcgagcaggtccgtcagaccaccgacatgggtcgactatagtccgggcatgctagactcaccccgagcaagtccgagagactgtgtccggcctcggcgagcagagaggccgagttcatgtaaatccccgctactcccttggtcgccgtcaacccgacgttgctcgccaggcctacgagggtgtcgatcgcggtgtacgcggagaagtcgggtacataggtaggacaggggagacgagagcggattcacggtggaatcagcctacaagacttggcagaaggatgacggctttgcccatactgccgcgaggtgcacttaccgagcagggtgattctactccccttgtccttcttctcacccgtcaaggccgcgatgatctcccccgcaccttccgaatgatcatggtgatgatgcccacccccaaagacaccatgcgagtgagagtgagaatgatcgtgatcgtgagcgtgaccactactagcatgcgcgtgtgtgtccgatgccgatgtcgaggtcgaggtcgggcgattcccgctgggttcctcctgacgaccgggcttatcgagcccactcctcgatcttagaccatcacctcctccagcggtctcactggtgttggacccgctcttgatccccgtggaatacgtcttgtccttgcccatggatggggagaggggagcaggagcgtcggctagtgacattcctaggatggctcgtcggttgtttctcgtcgacgtggatgttgaagccggtcttgatgttgacttgtataacgatgttgatatggatgacgatgatatcgatgtcaaagtcgatttcgatagaagacgaccgacttcgatcccagaacttcgaggacctctgaccacggtggagaacgagcaatcttgcgatccgaacccgcggctcttgctcgaagtaccggctgacctgatactactactgatccgcttcgagacccgcgaaccggacaggtcgagcggatagttgttcgaccgtgcgaatcgcaacgtccggccgagggtgaagaggggggaggcgggagaggacgacgtgatggaggtgatctcgctaggtggtgctggtgcgctcggaggaagaaaacgccggggaggtctgcccgggcgggtggaagggtggtcggaggtcgagtaggtgaaagtcgacgggggagttggtagtgggatggatgatgcgagtggggaagggaggtgtgtcgagtagtaataataatagtgagatgtctgtgggtatcgacgatgatgctgttgctgctggtaacaagctgacgacgacgagcgggtggaacgccgaacgcggaaattgcgagccggagacgacgacgagctcgaagaagaggatgaagccgatcgaccctggtttgctgttgtattccagtagagaggtccgggaagatgccaagatgtacgtagacctcgagtggatgttgatatggatgccggatgatgatgatgggcaggtttgactgggaccaagtcgcggttgctgctgttgtcacgtcgtttgaacgcgctcaacctcgtcggaatcggcaggaaacgcaaaacaagagtagctcggacaggtggaacgttgaccatcatcatcgtcgtcgtcgtcgtcgtcgtcgtcgtcgtcgtcgtcgtcgccactttcatcctcccccttagacaaagactacggagcagtagatccagctggcctaccacgttgtccagagattatcgcgattcaatggtcgatgtcgagctaactaaactagcaagctagtaaactgtgtgtatgcccggtccggcgcttgaacgatcgcgtcatcccaaacggaaaaagcaggaaagaggtcgacctcgacgacgttcgatttgattatggccacgctctagctgctacctgttcgtcaaatactctcggccatgactactctacatcctctacctgtagaacaagacactaccctttccgagttcccgaaaccccctccccgaacttccctcccgcccaaaaaatgaagccgtagtaggtcgctccggacgcggaggactcgttcgttggttgtccccgtttcaaacttcggaggaacggacgcgatgaacccgtctttcgatcgatgtggttggggctttacacaaagagtcattcgacaactcgacattcgccgttgcgttcacccagcgtcatctagcttccagagctataacgtcaagattatgatgttgaatttgctacttgccatccataccagtcacagtacacgcaattagtagtcatcgaccctttatcccgcgttcaaggtggaaattattacattttacaacatctcgatagttgtactcttgtaattcgatcttgtcatatcgggtcatctacatcccacacccccagaccttcctcacgcttcaacgcaccgacttgtactacagatcggaagtcccggcaggtgctcatcatgcagggtcaccatctggaccgacggctcgatcgtcatgggggttccccaccacaccgctatcatcccgatcacgatccagcctacgaccgacctacacgcaccgaccctacccaccgtgcttttgcacacacccggagaggtatcgggcacagcaattctgagcaccagaatgaggaccaccatcacccggtaatccaacatcacctggcaacccaactacaacctcaacctccgatgcacatgcacgtcccgcccaaaggccacggtcctcatcgaccgatcaaggtcccgacgttcgtccccgctcaggggaagtacgatgatctgggtcggacgctctttgatgggtttggggttggggtgcagggtggttcgacgggagtggcagccctctgcctctctccccctttgcctcgctctcctgctgctcgctgtcaccaacgcatccccaccaccaccaccacctaccagctcactcaacccacactcactcgtcgtatctatattccatcatcatatcattcaacctttggcaacatcaataccgattccaccccattctttccctcttcattctctcttctccccttattcccccctcaaaacaaatagaaaaaaaaacaagaacctgaaaatgtctgacaagtaagtgtttcgcgcagtttgagctccggtccgcgtcatccgtcgagggaaacgtctcgagacaggaggtctggaaaagtgtcgaatggccacagcgaaaccacctacccaggatcacaagtcccctcgtcttgcgtcatggtcttcaaggactagagagcgtccgggcgacggggtggtccctggctgtcattcgtcgtcgtgatcgatacatgtcgacacttgaccaccgcaccgaggggaaaaacggggcggaggaaatccggacgattatgttccccctaccacgaaacatttatccacagtcctacctaccccctatccgccttctgttacctgctcgtctacgacccgtctcacctcgtcgtagggctgcataagcagacactacccgttctgagatcacctcgtcatgccctcgctgtccctttgtctgatcgaggaaacccctattgtcgagcctaccgatgactgaccaaaactcttttttcttacctcttcctgtagagctgatatcggtttgatcggtaagtcgaggcgtcaactcgcatgtggctcgtttccatacagtctttgcgattcgtttggcgaaaactcgctatccctcaaggcatgggtgcatcggactgacctttttttctttcttctctttcgtgtctttccgtatcgatgtggttccctcccgtcctttgtttcgtgtgaactcgatgcttgatatgctgcgtgcgtctgatcgtcacaccatataggtttggccgtcatggtgagtttctacctctgctggcgtcggtttcgcacgagaaaccagtcgctcatccagcccccctatcgccttgtttgcaacttcttttgggaattcgacgtctatagggtcaaaactgtgagtctccctcgaatttgaccactgttttcgacaacgggcctgcgccgaccaatcgctttctgtgaatcagtgatcctcaacatggctgacaagggcttcaaggtctgtgcctacaaccgtaccacctccaaggtcgacgactttatggccaacgaggccaagggtgagcttcaagctgaacagccgccatctactcgggacactgatgctgacgccctcgattttccgtaccctcgtcctcaggcaagaacgtcatcggtgcccactcggtcgaggagctctgcgccaacttgaagactccccgaaagatcgtcttgctcgtcaaggccggtcccgccgtcgacgcctttattgagcagctcgagccccacctcgagaagggtgacattgtcattgacggtggaaactcgcactaccccgactcgatcaggaggaccgccgagttggagaagaagggattgttgttcgtcggatccggtgtttccggaggtgaggagggtgccaggcacggtccctctttgatgcccggtggaaaccccgccgcttggcctcacatcaaggagatcttccgtgagtgtcgatcgggcgcttgcccctttgatgtgttcgtgaacggcgagctgacgaccgacacggctatgctcgttctatggcgacctcgcagagaagaccgccgctcaggcctttggcgagccttgttgtgactgggtcggcgagtccggttccggtcactacgtcaagatggtccacaacggtatcgagtacggtgacatgcaattgatcgccgaggcttacgacatcctcacccgaggattgggtctctctgccggtgagatcgccgacatctttgagaaggtacgtagtagggccggcgggtacacctcgtccagaaacctgtgctgattccgttcctcacttgttgatcctcgtagtggaacaagggagtcctcgactcgttcttgatcgagatcacctaccagatcttgaggaagaacgacgacgacggtgtccccatcgtcgagaaggtcctcgactcggccggtcaaaagggaaccggtaaatggaccgccgtcaacgccctcgacatgggtacccccgtcaccttgatcggtgaggccgtctttgcccgatgcctctcttccctcaaggaggagcgtgtcagggcttccaaggtcttgcccgcccctccccgagaggctttcggaggcgacaagcagcagttcatcgacgacctcgagcaggccctctacgccgccaagatcatctcgtacgcccagggattcatgctcatgcgtgaggccggtaaggagtacggttggtcgttgaacaacgccggaatcgcccagatgtggcgaggaggttgcatcatcaagtcggtcttcttggccgacatcaccaaggctttccagaaggaccagaagctcgagtcgttgttgttcgacgactttttcaagtcggccatcgagaaggcttctcccggttggaggagggtcgtcgcccagtccaccctttggggaatccccatccccgcccactcgaccgccttgtcgttctttgacggatataggaccgaggtcttgcccgccgtgagtagcgcgttggtacagctggtttcacatacacaccgctgacactgttgcattccaatagtctttgatccaggcccagcgaggtaagcgcaaacgcgcgcgtgtgcgctcgatgatcttgtcatcatatactaacttgcgattgttttaccttgcctctcgaaaaaaaaagacttcttcgggttagttgcattctttctcaacatcctagattgtcttactgatccctctactctacagagctcacactttcagggtcatccctggcaagggctccgattcgcttcccgaaggcaaggacgtgcacgtcaactggaccggacgaggtggaaacgtctccgcctcgacttacaacgcttaaacgtagcgcggtctcggtggaactgaaggtgtgcgagccgagttgtcatgacataagagattagaatattttacagcaacggccgagttccagtgtctcccgagtgaggattgtcgcaaaaggcgcgtcgggttcgattctttggcgataccatcgcaactctcacacaagccaataaaggattgcgatgtgcgtactgatatcgtttagacaagggagatcgcgtccacaggattggctgctgtgtgctgatgatccgctcagtgtcaaaagtctgccggtgtcctgctggatcaggggatgggaattgctccgatctggaccaaaacgttggctcattgaccccttggtgtacctttgatacaccatatccagcttgttcatgacgtttccctttggttgaccagcaaccttgaattcctgcaactgctgttttctgtatccgactgtgcagactggcacctcggcaagttcgacaccggctcagagcggagaacccaggcaaaggtggcgcacaagtgtcattgatggtcgtgagatggataaggaggggaagattcatgtccatacagagctgtacagacgacttgacagatccagtccgaaattgtacgttcacatcgagtgacttgtgtcgatttcgacggactgcatgagatccacgagccgacgcaactgaatgcatatgtttggacattatgtcttgttacatccgactcgctctactcgggcttttccgtcttccccaccttttgagcttcctctgccaaaatcttggccgagacctggttacccggcaaaaccgcaagatgtgttagcacgtctgacacatgcaagttcatcctggacattcgctactgacgtttcgtacgttctgctcggccctctcgattcctagcgagaccgacttttcgtacaatttgagcgccggtcgaaggttcccagctgtttggtcacgggagtgtctgacttcagcgaggtcgagcaggctgaaggtatggcaggacatgaactcactggactcgagcacagcggcgaggttgaaagcgatctgaccgggtcacgaaattagcgtgggagtaaccccgtcgagcgtattcgcactcacctcgggatcctcgggagccaactccaaagcttgcctacgtccagtatacatgtcagtcccttgcctctgtgctcgatacacgataccttggcttggactcacttcagatgcctgatagccgcgccgggctcgggcgggttcgagaggatgtaagcggacgcgaggttcatgtgcgaatctgggctgtcgggttgcatggtcaaggcttgtttccacgcagcgatcgcggcggccgtgttttctagtcgggtcgcgcatctctatgtaagctcagacaggaggacacagacgacgattggtgatgaaacgactcacggaggtggtattcagctacctataagagcggtccgttcggtgtcagctcgaaccgtcttttacctgcacgatgtccgactaccgcacctacacccaagttgaagcatcccgaagcggtcggcttgatctcgacgctcttcgagtattgatccctagcgccctgaatgtctccctcttccaagtgcttgtttccctcttgcatggcttccatggcggtgtgctcggtaggatcctctaccgatggagctgccgagtcggtgctcgcaaagcctaagacaaacccgagaccgggatcagtgagaattgaacccgaatggttgtaaacactacaattctgctcacgcctggagctaaaagacaggtttgccggacgagtagagctcacggtagctgctcgtgttcgggtcgcgacagagatgctagcaaatccagctcgacgagcgggagcggccgaagcggcagcctggcgagcgagttgtactactgagcgacgcatgacaagtatgattgacttgatgtgaataggagtcggattgtgtagatgttgtttgcttgcctatctgttcgacctgattgccagtcaaaagtcggaacgaactttgaacatatgctctcgaggtagacttggcaaggtcgatgaatccgaggtcaaagcctctcttacgtcactcaacctcgaccccctgccgtcgatcgatcgagatcgtcaaagctggtcgagctgcaacttatcgcactcaattaaatgcaagaccttgcacgaccccctgtgtaagatagagcagaaaacaatcaggtctttgcgcaagacaggcgtctacagctaacatgccctttgccaaggccggcagagctccggtcgcgacggccctcttgccatgctttgaatcgctctgtcgatcgcctatcgccgggtcctctcgatcaactttacgtcctatctcatataccttccatcgaacctacgcccaaccagccagtcttccggctgaggatgaggatcgcacacagacacagccattgaatcagggcaccggtcccacggtgaccaaacgtcgtggaggcatgtctgaggaggagcgcgcgaaatgggctttcccgaccaagatcaatccgacgccgtacgatatcctacatctgcccaagacggccagtaaatcggaaataaaaaagcattgcaagtccctggtccgctcttccttgagatgggaactgatgagctgattcggctcgtcatcagattaccgcctagcgatgatctaccacccggacgcgaatcacccctcttcgtcgacggacaatttcatgtctcttcgaaatgcctacaacctactcaaagacgagcattctcgtgtccgttacaatcgtaccggcgtcggctggaacgcatccggagggtcaggtgggctgggaacgagctggaatgatgagctcatgaaggaacagatccgacgtcgagcttatggccctcatcgcacatcctcctcatcatcgtcatcctggggctcagggagaggggaagggggttactctcaagctcgttggggagggacggcaggggattcggactacgggttcgcaggatacgcccacgccggagcagatactgggaatcggagcgggaactatacgtcgaatgtgagattcataggatcggtcgccatcgtcgtaagtgcaagcatgacatgcgcaggttgctgctcgtcgacacggtactaagctgcgcatcatcggcggtgatctcgcgcttgtagagcgtgatattcgccatgtttcagtatgatcgagcgagcaagtccgccgaatcgcaccacgctcagctgaagatcaatcatctcaagcaagtctgcttcgttcttgtttcgagcgtccaactgcaaagtctgactggtcgaaatccgcagagcgtccgaggcgctagcagaagctcgacatgatgcccggttatacggtgcagaacgtcgagatcggatcaggcgatatgtccgtagtctcgaggtcgagcgcgagtacgagaggttgatggtagaaaacggggacgacgatggagatgctggcgagagaggcgacaagaggaaggaagacgccagcgccatcttgcacgggcaaggcaagtcgatagatgcagatgcagatgtccttcagagcgacacgtagcgtacgcttgaacggttgtaatcaccacaatatatgagccctgcttgaccattgaatacttgacaccccaaaggcgagacgttggcgcaaggtctttggccgccgtgtcttgaataggcggacagcgaggtcaacaaagccagtcgaaaacctgctattcgctcgcattaggagcacggacagaccagccggtacttctatcactggccgtcttgagaagagcaaccgacgttgttgctgaagtgccgactgaccgcgaatcgagatcccgtacatgccactttatcctgcatgacccactccatcggtaccctatgcattggatacaatcacaataacagaccctgtcgtgtggcgacctctcttgtaccaatcagtctagacggctcaagacgaccttgcgttgataagccagcaagattgggaccatatccctgatcccaaatttaggccagaatgttttgacaaactccaacgacgtgtttgaagagcactgtaccggggcgagtgtctcagtataccgcgctcggttgaggctgaagggtcatctgggactcacttgccacatcatgaaatcgctcaggcgtttcacgtcgcttgtccgtatgagaatgtccaaaggtggcgagtctgatttctgcgtggaaaggttgccgaacaagagatctgatgtgatttctctgttcggggggtcagagtttgtgataagacagaattcgcggaatgaaaaggggggattccaagatttaacttactcggtttgtatcaggccatttcttgcatccgcgaccgttgaacggatggcggtcgtaacctcatctctcgacgtgtatggacaacaaacattcaggatagatctaaggaggaagatttcagccacgttgctccattttttcacaggggaagtaagactcgcgatcgatgtgtcgatgtggaatcttccagttctttcatggaccgttggatctcgggcgggagcaaggatttccggccgagcacgttgacacggacgtcgtaacggtgcaagagctccctatagcaaacgaacatcgaggaccgacaagtacactctgattctgatgtactccgatagatcttcttgagatgaccgctcacccttcttccgacagcctcttcaggttcgttttggccaaatgcatgatatcgtcaatctcctcttgtggccgagtaaagttctctatactgaatgcgtagacggatacacaacggatattgaggcgtaggcattgttccagaatctgccgttgaaccatgttgtcagaaagtatcgaccgaggatcagactcggaatcgttattgtaacagcctgcctttaacgcctcggacgcacccctttcaagctctcgaacccggcttcgtggcctcttcctacacgaaggcctctttccctggcatatcgcctgttcccatccatcacgatggcgatatgtcggggtacaggtccgcaagacaagatggagaggagcagccgggtaaagcgagaggtagcatagctcgacaaagtctcgaggaacgaggacaagaccgagttgaggtcggatacgatcttgaaggtgagcatcgaggtggaaagacctggggaacggggattctatgtccacgagttggcgacaagtccggaagattcgaggtgtgcgactgcgagttgaaggttgtgtgatttgaccacacacaactgattgcaactaaagtgtgttccaatgctgcgtgatgaggttgatgagggtttcggaactataatctgattccgaaatcattattgtataccgtgatcacgtgatcacacaaccgctcatcaagagttgcggttgggagcatctcactttcaacaactctttctaaacatctaccatggtatatcaaatcatataacaacctgacgccttgacacctcgacccataaacatcaaccatgtcttcctctagtaccaaacaaccgaaacacagggtgtcgatccctgccaaatcggccttcaagagtcaggccaagggtaagcgacccgccgtcgccgtcgccgaagacgaaccggtgtcgacacaaaagcgatccgcacagttcgcgaaaaaggccagcaagcctagaaaggatgacttcgacgagcaaggtctgagtgatctttcagatggagccgagggagaggacgagtttgacgtcgaagccgacgacatggaggtagacgacgacgagaacgacgagggcagcagtgatgaggatgggacggacgaggagatcgaaggcatgaaggcggaccgaaagaggtccaagaagaacaccagtgagtgagagtttcaacccggaacttctctgaagcggaggctgacatcgtcttgacctcttccagaaaagcgaaaggcagctaccacctcggacgtgttcgcctcgaccttgacgtccctcttggaggaacccgctaccaaacgacccaagacggaatccgccgactctaaacccatcaagaccgaagtcaaccccatcctcgccctgtccgccgcttccgctcttccgccctcgacgaaacagatcaagatcgagcgtcaggctaagcgacaattgaagcaggaaaaagtcgagcggaaagatcgagcccgggtcaaggacgtcttggagggatggggaccccgagcgatcgtcgtggtgaaccatgacaaaaaggccgaggtcaaagacgaggccaagaagaacaagggaaagggcaagggcaagggcagtctcgtacaagaaggtgtcgaggtcatggcgcccggtggacaggaatgggaacggggacttcgaaaggttgctcagcgaggaggtgagtgcctgctcagatgaacgcgcttctacatcacactgatgatcccccttttcgctccagtgatcaagctgttcaacgccatcgtcgtcgcatcgagcacgcacaccgcacctctggccaaggacaagatcgatgcagcgcacaacgacaagaagacgaaaaaatcggacaaggacaatatcctcggccgaggcgccaagaaggacgacgtgttgaccaaggaagggtttttgggcatgttgaagaacgcatgaggaggcgtgccttttttggagttcatcttgtagtgtatggacggacagtgttgttataacatgggtacgagatcaataagcagtcgctgaaacaaatgactagaccaaagacacggcgaccccgatacatttctgttgaccggcagcacgacatctcatacgcgagtcaatgcgatgcaatgcaatggctggctgcatcccgcgcccgatgactcggtagtccatcggagccggtcgaagcttacacgaagcgcccatgcacagctcaccgagtcgctgtctgtggcttaacttacctacgctcgtacacttacctactttctagatggaatatccccataatcatcaaagagcgtccggccccgaccctggcaggacaaatgcttggtaaacctcacgagacgcgaacaagtatctcgatccaaagccaatagtgtttatgtcgcttcgatgttttcgaaaggttgattcagcggtcacgacctatcatgcatatccacaagctgattgggcgtcggaagctacccttgaaggaggcgtcatcatctgaaaggggcgattcgcgattcggtctgactggagcccgcctttgcgccagcgcatataagcagtagaggagaggaaccggaagaacacgtatacgatcagtatccttgacttgctcaacgagccaccgaataaaagtcaatcaacatgtgcttgcggtgggagaataccaattcaagcaattgccttcacgaaggcccgacgcgcgacagtgtccatcactttgaccccgacgctaacgtcgtccgaatctcgtctgatggcgttcgctttcaagtctgggattacgagttgcgagctggaaggtgagtcgagccctcaatacttgcgtctcatccctcgaagacatgctgacttgcaagcgattccaagcgaggtctttcgaaattgcctcaacgtcggggacaagggcgatgacgccaacccgaccctgcgcctggtcgaaaactcgggggtcgtacggacgatcctcgatgtcctcttgctccccatcgacaagatcgctacgacgccccaatactggacttttgaggaagcgaggacggagtacgctgcgtcggaaaagtacatgctggaccggtacatgtcggtctttgatcgccgtgtcgaaagggcggtcgaggttggccccttcgaggcactggtatgggctgtgacaaaggggcacgcgcggatcgctcgagtggcgatcgagcaattcgcaaatcaaacgttcttacggctaggatcggatcataccgatgtgaaacctggacactggacgacagccatgatcgtggccataggtgtgcaacactatcgacaactggttcggctgagcatggagtgtatcaccaagtcacgggaaacgggccggctgcgcatcgactgggtggtcgtaggcgagcggtttgagattgaccaggcgcactatgtcgccgttgatataacatcagacgcagaagacaagggcgtactagatgactaggcttcggcgtcatagaccgacttgaccttgtacatgttgacgttatcgttcggggtgatgacctctgaagttccgctatcattatataatcgtcgttagctcggccgggttgcgtaaagatggacagtggtagacccactagatcctgtcgaccttgtacatcttgtccttggacgtgatctcgaatccacgagtagcatccgagaggtagaccttgccctcgtcgttggaagcgggagcggcggtcgaggcagagggagtctcttcctttttggcagccggggcgggggtctccttagccttgttcttgacatccttggtcgccttcaagtccttgccccagcccttctcgccgggcttgccgacctccttggtcgagtctgcctcgaaaggcttacccttgagggcaacggtgacagccctcccgctgtgagatccgaccgacaattgagcacaacacgaacaaagcaatttctcgaggggtcatagcttactcggggatgaacccaaactccattcgtccctcgctatccttggttccttggaagatgtagaatcccttcctctcaaactgaataatgtcaaactttttcaagccgacgacgttcttgtcggccaaggccttgacgcggtactcagtgacggggttcaggacggcagtgaagtcgtcgtctccctcgatcttcttcttgttgatcagatagtcgtagtcgatcaaggtgacgggtacgaggttgctcgcgggctgagccaaccagtggacctttttgctcgtcttcttgacgtcaccttcgaggtgcaactcgagctcgaccgcgtcgaccttgcctccgtccgccttggagatcttcctgacaaaggcgttaccccaatccatagcggtaatctcctcgttgtcgccaaagagggcggcgtcgtactgctccatcaggaggtcggacgagaagaccgtcttcttgtcaccaatttcggggttcttcttgtgagcgggcaacgtcttggtctcgggctcggcaggtcctcccttgacgttaaccttgaccctacatcgtccgtacgaatatcaggtgccaccctagaacgtcggtgcaaaatgatccgactcacaagtcctcctcggcaacggcccagaatcggggagcgatagggtccacgacctttttgttccacgcccaaagctggtcccactccatcaacaagttgctcgacgaagctccctgcgaagcgatgaatcccttcaaagcctcgacggtcagacctctggcgcgcatgcctggttgccgacgacaaggaaagtgacaatcagcctccggcccctttctcccgcacagcacatgggcgaccgcacgcaagactcacctcgtagcgtagggaacctggggtcctcccacgtggccaccttgccctgctcgacgaggaacttgagctttcgcttcgacaagacggtgtagacgaaatcgatcctcgaaaagtcgaaaatctcgatgtgcgccagtcccagctttttcaagaaccactcgtactgcggcttcctgtcggcatactcgttggctcgtagggcgtgggtgacgccgtcgagcgaatcgacgatggggcaggccatgtcgtacatggggtacgccttgaatttgtccccggtgatgtgatgggccttgagaacgcatcggaacacggcggggtctcgcatagaaccgttcgagctggtgtgatcaatcttggctcgcatgaaccacctctggccttcctcggacccgacgagcatctcttcgaatcgcttgaggttgtcctcgatcgactcgtcccttcgtttcgagggtatcatggcttttcgctggtctcgcatctgtcgacagggtcattcgactgtcagccttaggtcggccccggcccctggccggacgtgccaactcacagtctgctgatcagtgtcgtccatgaacgcatcaccctgctggatcaacctcctcgcaaagtcttgaatcttgtcaaagtgatcgctcgtgtggacgaccttgtcccagccgacgccgagcatctgcaagtctccctcaaaggacgactcgaactcgtcctcctccttttccgggttggtatcgtcgaatcggaggataaacttgcccttgtacttgtcggcaaagaatcggttgaggatacaggccttgatgtgaccgatatggaggtaacccgagggttcaggagctgcaatcatacggccgggatttagcaggggggtatcgtccggatcgacgcgtgacgtctcgactcaccgaatcggacgacgaccttgccctcgacggcattaggcaattcagcctcgaccgtacccgccttcttggtctcggccttggcggtctttgcctacaagtcccatcgacacgcccttgtcagtcttgagatccttgaaaaactcgacacgaaacgtacggtctgggacttggagttgaacaacccggtgacgatctcctgggtggcaggaagggcgtcgatgtagttgtaccatcgggtaaggtggacgtgtcgattctgcttgagcactcccaaggccttcaacgaggctgtaagtggggtacaatgttcgaacagtacatttaagctggagcttcaaaagatgagcaggaggcaagacggacctttaatgctagcccagattttaaagtcgttgaacccgggttgacgtccagccaaaaaggtcctgtttgatgaccgattctgaatcagatttacggacacagagcaaacgacagcaacggaaagatacgccggcttacctcaaagcgagatgatcatcgagagcattgaaaatggcagggacctcttggaaaggggtggtgggggtcaagggagtgggcaggctgggcaaggcggtctagccatcgtcgtcgtcgccatccgcaggaccaagtcagccccggtatgtcgactcggcttgaatggacacccacctctttacccttgagcttgctagccaaggcggtctcgatctcctcgaccgtggtcttgccgtcgtattgcaacttgccagccaaccagtcgatctgaatgtgctggtgcgacgcgagtagggcgaccgaccaggggaatgggttttgagcgacgtctacttggagagaagccatggttccaatttcttttcgttctttcaagagatctcttcttgcgagatactaatctggaagagcgagattagtaggatcggatatgggatgaagattgagatagtgacgaatgtgaagatgttctgttgatcgactttaaaagtacagtagagcgtagtactcagtagccgctcactacgttacggtatggagtggtcgagatgatgatgacacggacatctcgttgtttttcatatctcatactctagtacatgtccgtgttctgatgtccgcgtcttgtttccctcggtgatcattgcttgacctctcgcccggatacatgccgagcctacgagtactcactcactcatgtacgtgtacggattagcgattccacttgttgagcctctccaaaaggtcaccacgggtcagtttgatgcaaatcggctctggaacgatcattgcaaggtattagcccgtcagacccatataccaaccatccgacccgtcacccgagcgaccgcatctcgggcaatttcatgcgccaagagcaacgagcgggctcgatcaggagaacattcagcaacctcgaaatcactacccttcaatgatgtctggattgctactcgacggtagtgaccatagtatgcttcccgagcgtggatatacaagcgactgtatatctactcatgcacaggccatcagtatagtcaaattcgaggtggaccggtataaacaacaaggcaaacctccacctgtcgagtcagtccgcatacacctctggccgtgtgactccacttcacatccatctcaagtcggcttacatcactttcatgatcctcgcttcccacacaccctgttcccatcggtcgacagggtcatcacggacgtgttcatccggtacgtccgtggcaaacgagccaaaggtcatccaccctcccgtatcgccctgaagctctcggacctcgtctccagtatcaaggggcgtaacctcgtgagtacctacaccctctttccaggtcagggtagaacgtgtcactcacctacctggcttcttcccccgtcgactcgcgtgggtagtattgggaagatcctgcgacgctggacaaagccctgcaccggaccctcacgtgcgagaacctgaataccggtctcaaccctcctacgagcgggcaatactcgatccacctccctcgtccgcccgggagtgacgtccacagaccctcactgggggtggaacagggaggtggggatgctccgcccgcttaccaggcgggttgggagatggaggctgcgttgagggagagcgcgagggtcgcccggacatgaacaagaagcgggaggatatcaagggtgagactgttagatcgtatgtatgtcgagcatggattgaagtggatagtggatagataaaggccgggagctcatgatcttgatactgggttgtcggtgattgtatgatccgcttgaacctcccattgtgtgtcagaacagagacaggtcgtgggtatgaaatggcgtaagtacgggtcttcagtaaagaatgccgggttcaacggtcgagcagaacgatgtggagacagcattcaggggattataaattggtgtatacaacgaatgaacatacgaatcggaccatcacctggccgggaatcagtcaaccagtgtattgtccgagctgattcccaaaaggtaatggggttggcataggcgggagacgacttggtagtccggataacaacatagatctgaatgccgatgatctccatatctctatgtattctgccgcacggaaacaggatacatcgtgcgacagcgacaagactgaatcccgcgagaaaccggccctgactgcacacattgacggtcgcgtccggaatccgctcaagcggcctatcgctgactagccaggcgttcgggtgaggcaagagcgaatcggtatgatcaccaactgcagtgcagatatcgtgcccgccagtattgctcttcccgctcatcctctcaacgagtactcccgctgtagtcgatgtaccacagttccaggcgaagtcgatgataatgctcgttgccgtgactgaaattgaaacattgttggacccgacgggcgtccccagaaggtactcatccgaatcagagattctccagaccattgagagacagaatcaagggtgtgacaagcggcagtaggcaagctcaccagagctgtatacactccaagtcggtacgattcgccgagcatttccccgttcaggtattgcaataccgtcaacgacctgctaatccggctgtagtgctaccgtcagtgtgacgttgtcatttgattcggatgcgcccacacgctgagctatatgaaaccggtgagcggtttcaaatcatcttcaaggtgatcccgataacgcgtccagatttgacacgtcatccgtgttgtctggcgcgtctatccattatttatcagttcgtgtcccttctgacgaccgccgagcattctcgtccttgttatttgtttacggtttggaacatgtcgacatgccgagggcgttcgatgagaccttgatcgagcatcatcgacctttgtctcagtgattagctccacgatctccgtcgtgaacgtctgaccacagtgaccatcatgtcgtcccttcgtgacgccttgtcgaacttggaggaacagacgcaccagatccacgagctggccgttcagaccgcttcgcgacctctcgccgggagattcaccaaggcgtacctccagggtactcaaaacatcttcagtatcatccgggaagccgccaaccatgaacgagggttgttcaatttcatcggagagagcgggctggacgatgcgggacagccggtcgtcgaggggatggcagctggtaacctagtcgaaaggaggaaaccgggcatggtcacccctttaaggaaaccccctgcggccggaggagatgatcccgtcaaactgctggacaaagctctgacgttggtggatgaatagtaagcattcaatgtgctgaaatcggacgaagaggttgacacgatactgaacgatcttgtcgatatgttcagccgatcaatgcctcgagccagagctcacgtggtcgatctcatggaatcgttcttgaccacacaacaggctatcaaggatctcgagcagcaaatcgaagaggtacgacgagactctcctgtctgatgactcgagtctggtctgacaaagatgttgcacttgctaggccaaacaaggcggagctaaacctggacctggatcgggtgccaagcaatcgatcgaggtgcaagataccccagagcctactttcgagagtcctgacgattggttgaaagccgaggaagaggccatcaagaagctggaaaaggagatcgcagccaagcgacgtagcgtgagtgcacgcatagcgtcagacgcctcgtcctcagtgtcctgaaagtctcgatgcccacagcaaccagccggaggctcccggtcacgaggcgctaacaaccagaacgagctcgcaactactccgtctcccactctgttgaccaggacgtcccgcccgatgtcgatggcatccccgggctctccgttgaaatcgatgaggttccccgcttctccccgtcatcgagagaggatgaccatgcaaacaccgatcaaacagacacctctcaggatgggaacggttcctcagagccccgagactcctaccactgacaagaacacgacgccgacccgacctaccactctcggctcgcccggccgtcccacgggagcggtgtcctcgagaacgacaaccacccctcgattcgcacagaccaccacgagcttggcggccaagatcaacgcgctcactcctcaccgatcgagaccatccgaggtcaacgagaaacgacgaatcacctcatactcggccccgcaagaggtcagtccgggcccgtttttggccaattcgtccgggccgtctggacgaggaaaacgagtgggtttgttcggactaagcagcaaggagggtccgaaaaaacaggcggaaccgatcgcttcgccgagaacgaagagggagttgccgagcgagcgagctgcagagccagtgggcgaatcgacagtcatggaagctcgacctaccagtcctagtcccgcacccgccgaagaagttggcgacgagactgtaacgggaccatcggccggatcggaacaggtcgaccctgtacctccagccactcaggctgatccgatggtcgagggcgtcagagtggactctcccgctgtgaaggacggaatcgtgagtggcgtcccgtgtcagctcaatgaagcacgagcgtctgataagcaagtttccctgcatagacgacggtctggactttggtgcccgaggtcttgagaagcgaagaggccgggccagaggtttgcgcaggcaagacgttagacgtccgagggaccgtgtaggtcgacgcgtctcatgcatgattgccgagtcccccgagctgatcaatacacgtcgatttcttgtttggctactggtagcgccctcctggccaagattgctagcgtgactgatatccgtgcgccatcaccctccaacgtctcggtggcatccagcagtctacagtccaccacccctggctctgcaccgcccttaaccaaacccccacccacgaccgactcgaacgtgctcatgtgtcacttgatcctcttcattctgcgcacggacgatgtcatggtcagtatgcccgacctcaagaagtatctggacgacgtgagcaaggggaaaggatgggaaggaagggcggggacgacggcgttttacgcggccgtggccaaaaagctcatcaagatcgaccgaaaggggcctgtcaagggtgggaccgtgaggcttgacaaggtctgatccaggtttcggaagacgggcgtctggtatagcgttgctcaagcgatcgatttataatgattcaccagacttccttccgtagtctgcgagaccgaccgagtgcgctttctgtgttgattcatttgcaactcgttatcggttcgcttgatgaatccccccccctcgcgcctcttaacccccgcgctttctttgtccacgtcatcagacgattcccatgaaccaaaaatcgtcccatgattttttgtttccgcaccggccacgtaatctaatcgctatctcttcgcatcgcaaacgttcgccacttctcggagctcagagtctcttgatctcaaaagagtgcgagagtcgatccaccttgacgaacagtcatttctgttttacaacacccttctcccagacagagttcgactatcgataaacaagactggataccggacaagacaaccatcggtcggtacactcgtctcgctaccaaccttttccgtacaccgtcccatccctactgtacgatgaaatccaaaacgatgatgcccacgaaaacgcacaagacgatctgggaatcacctctcgtctcctattccccgttccatgcctctccttgaacacgactcccgagtcggatgctcacgactcgtgatctcgtttgatcggtcccgtatcgcacagatcggacgacccactttacaattgagaaggaatcaaacacgtgttcgaccccgcacattcgcgattcccatctttcgctccgtcgtacgcaacgtcacgcaccgggacaatatacaactgcatagagtggtcgtactcggcttctccatcacttgtatacgacttgctagacctcagcgacataagccggacaggcacgccaaacaactcgcgcggtccaagtcgacaaacgtgtatccccacacacgccccccccccccccccccccccccccttcttcgacgaccttccccccctctcgtgcaagataaaacaaaacggacagagctcaacccgtgatccggtggaacgagactcgggaaccatgtcggtcgacctttcaccgaccttccatcctaccgctccagccgaggaagaccccgtatcgttctcctcgtacgtcgacccgatggtggtggaccctgagaagcaagtcgtcgtccaggcagaggaagcgatcgacctggacagtctggtcagggatgaagccatgatcgaggaacctggggaacagcccgtagggagcggcgatgatcgaccctgggggacggatcagcatcaacatcagcatcaacgtcaacgtcaatatcagcctcggatacaggggttcgagccgcatcgcatcgggtcaaactcggtcctcccacaaggtcgaggtcgggaaggaggacaagaggccgtcgagtacgtcggcgtacaagggtattcgggaggaccgttcgacgttgggacgcccgtgtcgtaccaggacggatcgaatgggttccggcataccgcgacggcgacgaactcgaactcgatctcgacctcgatcccgcaggatgaagggtcacccgaggtcgaggtcgtaggcgagacgggaccgacagtgatggcttcgtcgtcctcatcatcgtcgaagcatcctctacgagcggagaatcatgggcaggggacgatgatgggtggtcatcaacacgcattccagacgagcgcgttctcgccacgagcggcaacgtctgttccctttcaacatggccctccagcggggttcgggaaccagagcttccacatcgggtctacgtcacagttttatcctgccgttaccaataaccacaataggttctcgacgatgacctcaagcatgcctcccgctctctccgctcccgcccctggccccggccccggccccgcagcctctccctcttcctcgacacacgacaataacaacggatccgccatcgacctgaccaacgacgacgtcgcttcgcgatactcccaaccgacaaacgtccaacccgctcaacccgctcaactggacatgaccgaccgtcgacccgtctgtataggttcgatcgatacgcaggcattgatcttgtacccgatctcgatcatgcaaaagggaagcgatcgggacgaactcgtccgcgccggggaattgagagtggatcagggaggggaagagtggttaaaggtcaagctcaagtttagaaagggcaagggggtcggacaggcaccaggtggggacgcggggaatggacaggcggcggatacggtcatcaacattatgagctgtgagtcgagtataggagtggatggcggggggacgccggtccgtgattttgactgctaacccggatgatatcaccccctgaatagccaagcagacggtggtcatcggggtcgtcaacgggcaggtacatggcatgtttgcaccgctcatgggcaaaggcctgatcaggctcgaaggatacatcaaacggggcaagctcgaaaatgtgagtaggacggtagtgaatgctatcgagcgggagtttgctggggaaaagactggctgatcgaccacgctgacgccgacgccaatctcgcagatgttcacggccgtcctcaacatcttgagctttactctaccttcgaacgtgacgtatattgccgattatctcgccaacgcgaatcaattcctcgatcaccctctaccgtactacatcccagagaaccactttgactcgcccatctactacaatccgcacaacccgcccgtcgaggggttccgagcgatgcggaagaacaggctggacgcgatgatgggccgaggcgcgatgcagcagcagcaacaaaagacgatcgacatccagcgggatcaggtcgatcaggttttcatggcgttgcctagtcacgacgatctaccagagacggatccgggagaaatgatcaagaccaagttgttcccccatcaactcaaggcgatcacgttcttgcaacagagggaaaacgaatcggccgccatcaaggcggcctcggcggcacccaaggaggatatcgaaattgtcgacgtcgacgccgagatgagcgaggacgaaaagaagaagcagatcaagaggatcaagaaaaaggcggaaaaggatgccaagaaaaagggcgtcaatagtctttggttgccacagtatgacggatcggggaaaaagatcaaggcatggaaacatttggtcacggacgagacggtcaaatccaaggaaaagccggtcgaggcgagaggcgccatcttggcagacgaggtgagtcgcacgaaagaatctgcctaggaaagagcgaaaacggaagctgacagactcgtatggaacgatgataacctcctagatgggtctcggaaagaccctgtcgatcgtcagcttgatcgcttcgacccttccgagtgcaaggaaattcgcacacgtctcggccaaggaagaaccgaccgactcggatggttcgaacgaccacgacggcgatgccggagatctcgatgcctcccatttcgcggggtccgtgtatggcatgccttctgaagacggcaacagcaagaagcgaaagagagagacgggttacaagtttactccggacaagatcgccaagctcgaacgtaaaggtcggatggacaggttgaaactgaaatcgcgtgcgaccctcttgatctgccccttgtctaccgtatcgaattgggaggaacagattcgggaccattggaggggacgagttcatgtcgtcggggccgcggtggaaaaggggaaaaagacggaaaagccgatgccggaaaagggagacctcaaaatttacatttaccacggcaattcgagaaagaatgacctcgaattcctagccgactttgacgtggtgattacgaccttttcagtgttgcagactgaatactcgaaacagatcaaaacctccgagggtgaaaagacctatctcgacaagtcgctcgtcagcaaggccgctggatcttcgtcggcagcgacgcccatcgcttctgattttggtggcgacgataacgatagcaacgatctggacggatacggccaaggtcaggaaaggccagaggttcgagcggaacgtctaagcttgcagcgcaactcgggggacacgaaaaagaagaacaagaacatggacatggacttgtttgggaaaaagacggcgtcagaggtggtcagcccgttgcaagcagtcgagtggttcagggtcgtgctcgacgaggcacagtgagcacatggatacgtcattcatgtacgcttgtgagctgatctctctttcgccagtttcatcaaggaccctaccacggtcgtgtctcgggcggcctgctatctcgaggcgcagcgccgagtttgtctatctggaacgcccattcagaacaagctggacgacatttgggcgctattcaagtttcttcgtctggcccctttcgacaaacgcgaggtatggaacaggttcatcatggattatgccaaagccggcaactcgctcggcgtggtccgtctgcagaccattctcaagcactgcacgttgcgacgtaccaaggactcggtcaacgaggatggaaacaagatactcgacctcccgcccagaagggaacatgtcgtcacactcaagttgcaagacgaagagagaaagatctatgatcatcacttcaagcaaggccagaagcaattccaagaagccaacgaggacggcaaggtcgacgtcgttaatattctccaacaaatcctgcgcttgcggcagatctgtgatcatccttcgctactggacacatgtattgccgaggatctcgaggaggagattatggccgacggcctgatggaccttgacaccgccaagcaggcgatcgagaaggacggaatcaatctgagaagggctctggcgtacattgccaacctccgacctgaagaacctgcgtcgtgtgcatcgtgtcagtacagtttcaacgtggccgagatggtcaaagaggatccagaaggagacgagcctgcaaacaagacagcaagaggaggcaagcgtaagaccaaagccaactaccccatcttgactaggtgttgtcatctctattgcaagtcgttgattcgcttggttacgtctgtcgtgtggaggctaatcttgttcctaaaacaggcctagcgtgtttcaagaagctcgtctttccagactggccgaagaatgcactcaatgctggtcggacctgtggcatgtgcaacagggctcttcgactcggtcgggatgtgatcgaggtctctccgggatcagccgttctagcagaaggcgccgacggaaggtcaaaatccagacgaagacgaaaggtcgacgatggattccagtattcgtccaaaatgctggcactactgcaagacttgctaaaaaattcgactgtcaacccgcaatctgagaattatgatcctcttttcgccaactcggatattgcagagatggacgagaacggtcaaccggtggtgaccaaatcagtcgtcttgtaagtatgaatcagacgagactaccgggccaggagtgctgattacatgcacgactttcgcggcaaccagctctcaatggacttccatgctcgatctgtaagtgttggtctggtcagagtcgaagggctctcagcattctgaccattcggtgtgggcgtgcacagtctcgaaggaatgctcgaaaagaacgcgatcggttgcgctcgtttggacggaacaatgaaaagagaagatcgtacagaagcgatggagcggctcaagtcggatggaaagtgcgaagtgcttttggtatccttacgagctggtggtgtcggactcaacctggtggcagcctctcgctgttaccttatcgacccatactggtaagcccggttcggccggtgtatatacctttgactaacatcgtgcttcgttcaggaaccccgccgttgaagcacaggctattgatcgtgtggtaagtaaccatgtgagaagaccacgaggctatgacgctgagcccaatcccgcactcagcatcgtatgggtcaaaagcgaaacgttgtcgctatacgatacatgattgaggacagtatagaagaaacaatgctcaagattcaagaccggaaacgagaattggccaacatgtcgctcaatcaatcgctcagcaagaaagagcttcacgaccgcaagatggatgacctgagggagattttcaaacagtagggtgaacctgctaacgcataatctagttcatctcctttatctacgatagttaacgaaattgtacgacccaacgccggtaaacatgccatgatcacaagaccgggcgcaatcgcttcttgactcggaatgtataggggtctgcaacgaaacgacatgcgattgaaatcgaaacaaggttgattacatttgggattgaaacccctatgctcatctagaatccaacgcaatcgagcaacttggctgcgatcgcgccctccatgcctaaaacctcgagaaccgtcttttcaactattcccccaaaggcgtctctagcccttgctcgttcagtcgcactcaagcgtatgtctgcagagccgttcaccgtgtctgtgatcgccatgtctgcgtcgagcaagccaggcggggccggcaatccgaatgcgccctccctctccatctttctccttttccgcgctcgtcgtccaccctcgggatcctcggcgtcttgttcattttccactcgttccgtatcgatacgtaatgcctttcccaggttacgaagcacaaggcttgcgaaaaaggcgtccgatgccggctggcccttgatgtcgactggggacatgattccagtgtaatgcaggccgtactctcgcggcaagattggtggctggcggtacgtcaaaaaggtcgacttgacgctctctgccgagctctcagggtgaatcagtacccgtttgattttgggttcacgatcggtcttgatcggaggcgggacgtgcgtgacgagatgagtggcgctgctactcttgctcctacacgaatgccatcgacaagacgatgtcagctcagtaccgtgttccgctttgagatgagcatatagctcctcggggttccgattagagtgggacttgctacatccttcccagcgacacgcaaaagtatgtagacggcctgccgagcggggtgggctatggtcagtctcgacgagacaccgtggaacccgaccacgagcagacgagactcaccggcactcctcttgaacctcattccggcaatgacaaacaggttttgcggcaacggctggcctttatcatccttgttgatcaccatggcatttgcggccggaaacacggtcgtcgcgctcttgataacatcgcctgccgttccactcgccggtaccggtggctcgtccggcatcgcttgctgaacgaatgcgctgtaggctttccagaacaccacctgggtgacggaagattcaggttgcgagacaaacgtatcggccatcctatcgggacgagtcgatccgagggagaacgtcagcctgaagccctagcaatagagagacaggggtggggagcgacgtaccacgtatgcgccctctctggctccttcatcgacctgatcctcctcctcttttcgtcgctcatccggacgaccggtcccaatccgaccttttcacccgtctcgtcctttccgtcatcctgcttgagagccaccccgaccgtctgcagggccgagtaatgcttgccgtgagaatccgtcctgtcgacggtctggtacctcgacgctccaggttccggtacctcgacgtacttgccgacctgccccgtgtgtttcagggcgagcgacagttcccgcgcgtcccatttgaccaagcgcgtgaggatccggagataatttacgatctcgggatccttgaggaccgacaggctggtagtcatttcctgggtgatgtggtacaggaggttgagcgagttggtcaacagttcaggtgggtaaggtgatggctgggtgatgatcttgccggtcgatcgattgatcctccctgatccgacggcgggggtgagtagcaggaacgagatcaacttggggatcaatttggcagaagggaggtattgtgccgggacgagggtgaacagctgagcgaggggtatgatgaacccgacgtctccggtggtgaggaacagttcggggagcgtctcgcagatcagaggtcgtagcatccgagccgtcaacatggccgtggtgaccgtagccgcggcaccatcgtcctgttcgtccgggaccggggcttcggactcttccaacagtgggatgagcgatgggaggagcgcgatcagcaagtccaggatgtagagcatgggttcgggtcgtttcatcgtggcctttgataatccctcgatcgatacgccgggaatcaccgttttgagctgatcagacggtgcggcagcgactttgaccggatcgtccctgacattcgaaaccgagtcgacctcgtccaatccaccatacagcctagtgatcaagctcaacaccctcgggggtaggatcatggcctcttcgactcgtggaacggcgacctgctccaaggtcggtctcgtcttgacccagaggacgacctgcttgttctgcctggcgagcgcgttctcgacgtcttccccggcaaagacggcgttcctcaggatcaagagggcgtcggtcgcccgtcgttcccgttcgaccgaaccggcatccttgcccagccctaagatcccggcaaatgaacggacttgcgtatcgtcgccctgacccggaatcttgcgtctcgcagtggttgaggtggtggtggtggtgacggtctcgcgctcgacgtcctctatccacggttcaacgaggtccaataaggcttccacggacccggggaaatcagagatgacgatccggctctgatgggtcaagcgaacgagctcttcgatcgcataatctatctcgctggggatcccactgcggagagagagaaagagccgattgttcggggagggacggaggttgtaacctggacgagtccgggggggtaaggcgagcgtggagtttaaaagagaggaagcatgcggagagtgatgagagggaggaatgggtcagcaaggaggaacaagagccggagtttccccttctcgtacgacgtaccttgtttggacatggcttcctcttgcgctcgcttgttttgttgattcgtagcctgtagcgtgatcgattccctcgaggcagtcctatccaatttagagaggttccggacggggggtacgtggtcctgagaggggtaacgatgaggacctgggtgaggttgggctggactaggaattcgatagagaggttgggcggatggaggaaacggtgatccggcttgtgggtgtggacggtactgatacggcgccgaggtggtcaacggggatgaaatcggggctgatcccgaaccgcgattcagtgcggtgtaaaggggagttgcctgtgtaggaggttgcgctgctggtgctggtgctggtgctggtgctggtggtcgtcgcgattgacgctgctggtgatcctcggattcgctgcttccttgcccttctggaccttctgatgctcgtagacgcccgttcatggaaagaaacccgacggtggtcttggcggcagcaaggtagacgctacgagattgacgaccgagatgaagcggcagcggcggtgtgaccgggggagaagagggtaagagtgcctcagtcggaaccggtgttcatcgtccgtcgtctgcgtccaccaaggggggtgtaggtgggatgatctcttttgttgctctttgtctcgagaccgacgatcacgaggttgatatggtgacgatactgtcgaaatgtggagtcggtgtgaacgacggtgagcagaatgaatatggctgggtgacagaacagttgaatggatgcgatgttggttgaagcaacttcctctcgtctcgtagcctcgtagctagcctagcctggttttgcgtgagactcgactttatcgcgtgaattgcagcgagatttcttgacgacggatcaaaggatcgtcaaatacgaccaacaccacagatccacagatgtttcctgcttcctcgagtcttccccgggaaaagagaaccgtatcaacagagtagcctgtcgattcagatgatagactgacatgcatgctcatggccggtgtgtgttgctttccctttacttttgccattttgcgtttttgcccgtcacgaaacgcgcgcgcgggcacgggcaaacacatcacaaatggccaaatggctcatatgagctgaaatccatggcatatagatacacacaaacactccttcaacacccctctacctttcgacaggcattcaagaccgagctagtcacacttgtccggtgccatgtcgagaatgaacgtctcctcgtcgtcgggtatgcatacccagggcgcattcacccacgtctcggaacacctacacatcatcgccctttcgaccgtcttcttctttgcggtcgacatcctgtcggtcccgttcggacgagcgttcttccccaaacaatacgccgggttcaacaagaagacgcagagagtctggaggagtcgagctgtgggtgagtcccgatcgttcattagcgaggcagtgtgcagtgcagccggacaaagagatggataagaacctggccagacacgttcatgaacaacactgacacgacctactcttacatacaccccggtggccccccatgcagctctcgtacatgccgtcctttgcatcccgctatgcatctggacttacaattaccctactctgaggaacgacaaggtctttgggtatgatcctaccctgggcagcgtgatcgctttcagctacgggtgagcatcgtcgtcgagaaaatccccccaactcccaactctccctttgaggactagctgcgcgcgtcaatcggtgactaactcgatggatacttactaccctggtcacttatcatctgctacgtttcgactatccggcgaattcgcacggctctcgttctatcagctagtaagccccacttcgatatcaaaacctgcaggccatcgcgaatatactgaccgtccccctttactttctttcccgaccctgcgtttgctggcgaccggaaacagtttcatttgggacgtctatgatgccgtcttgtaccaatccgccggcttcgtcgtgcacggtctcgcctgtctagtcatctttgctttcagctttgtgagcacatcctctccccctccctcgtgggggctcgtcgactgacttccccgcatgcgtagagaccgttcttgcaatactacgcgccgacttttttgctctgggaattgtccacgccgatgctcaacttgaggtggtactttgtaagctcctgctcctccacgcggttccctcctgctccaatagtccttcggaatcttattggacgccgtcggcaccgtcggtttgataggagaaactcggttgggacaagaaataccccacgctcaacctcgtcaacgacctcttgttcgtctttgcattcttcctggcgaggatcgtctttgggaccatcaacgtcagtaccgccggtatcagcgcgattcagctcgataaaggtcaaagcacaagatcgggcagctaaaggttttcgacgttcgtacagtcggtcacctttttcaagagcatcgtcgcggaaagggaaaggatccctctctggttgttttgcacggtgagtcatagtgaagggatgacgccgtaacacgtggagctgacagagggcaatgtatatatagtacggagcgggaaacatcgctctgaacagtctcaactggtaggtctagtctccggacgcatactttcagtaatcgcgaaacctctcgctgacacctttgcgaccgccgcgcaggctctggttttccaagatcgcacgtaggatgattgccacgcttcagaacaagcccgaggcgaccaaacccgtcaagcggtcaaatggggaaaagaagagcaacggctcgggtcccgccccgacgggcgaagagatggtcgagaacgtcgacttcaaagatgaaccgcttgtagaggctatcgatcaatacaaccagtacgaccagccttacggcgaggtcgaggagcagaatgggcgggtgacgagcgatgccggtcgggacatggacgtccagcccataagcacgaacgggaaatcgctcgccatccagcgtcaaggtcgagaacccgccgatccagattcgcccagtcccgtctttacggaccgacaagcgtttctcatcgcgctcggatttcgttccctgtctctcgcctcacagacgtttttccagcccgacgaattctatcaatcgctcgagcctgcgcactggctcgtctttggaaccggtttcttgtcgtgggaatggagagacctgccagccctgtccgaagagactttgcggacgatcatcgagcgaggcggatggagatccaagctggtccgactcgtcggtacgcaggccggtggacggttgaggagctggttgtggccaggcgtattcgcactcgtttacaagtcgctccagttgacgggattggatgataccagattgctcgtgagattcggttccccgtctgtcggcttgtcgagatgacacgcgcgcccccagtcagcgattctaaagtaccttccttgccttttgctctcactcgtcaccttgcaccatgacgcagctcatcgcgcctcgcctgccttgcgtcttgctggctgctctcacggatctctatactttcaagctcgcacagaggatcttgccgggaaggggtgaagccgctgtacgctcgtttccatcccgcgcgcgtgtatcggacccacatactgatgatttcgtcggacagtttttcctttccttgaccaatcttttccatgcgcacgcattgacacgggctttgagcacgtctgcagaggcgtccctcacgatcatcgctctgtactactgggccttccagcgccccgcaacgccgattgctggcaacaagtcacacagccgcaagatcgatttcggacgactggcgctctcactggccttgtctgctactgcattcatactgcgacctacgaacgtcgtgttctgggtcgtcatgggaggggaactcgtcattcgcgtgtcgcggcacgatgcaaccgcgggggtcaagattatactgttggctacttccatcgggttcgtctttcgaccagaagggtgtgagaattgaaactgaacatcccgcacgtttcagactgatcgcactgaccgcttctgccgccctggattatgccctcgtcggcatcaaggaaattcccggacgctcctttttggtctacaatgtgctctatgacctgtccagccttttcgggatctcgccttggcactaccatctatttcaaacactacctattctactcgcaaccgccctgccattcgttctcccgcccttcctcaaagcacttgtcggaatgacgccttcccggacgttgtcagactcgcgtcagagcgttgaggcgctcaaagttcaggatcacaatttgcaagtcctggctgtggcgactgccgtcaccatcactgcctactcgtcgatacaacacaaggaatggcgctttctgcacccgatactccccgtcatgctgatattcggcgcgcatgcgctcgttaccgcgtaccgccctgtcgcaggaggagaccttttgaatcgcaagtttaggacgctctactctggtcttcgaatcaacaagggctcgtttctcttcctctcgcttgcgccactcctcccgtggatatacctggcctttttccacggtagaggtcaggtggccgtaacggaatggtttgctacgcaagtccgacgagacccaagcatcaaggccctcttcttgatgccttgccatacgactccatggatgtcacacatacacagcaaggtgccagcgcaggcggataggtggcatttcctcacatgcgaacccccgatcaagtaagccgtgcgggggggaaataccattccagtgtctcggcgctgatcttgacgatgtttcccgaagcacctctgcggacaacgaagcaatgattttttacgccgatccgatgaaaaatatcgaggcagtcgggagcgatatcacgcatctggtcttctatggcgatttcttcaagcgacggtacccaggattcgatggaccgctgtgccgcttgcacctagagcaagcagggtggaccgagatctggcagacggtctggaacgggttcgacatattgcaagacgatacattgagacaaggtggcttacatgtattagagcggactctacgtaaaggcaaggcttcaaaggcggggtcagaagataatcaaggacggtcgtagcgatagatcaaacgttaatactgtatctccttggggtttgtgtcgtatagctacaatattagatgcggcatatgagtaaatttcgttgtacccagaccagaactactgatatctcgtggcttgtcgccccagctctcggcttttagatgatgaaagctgtgtcgatgataacgtgaactttctgctggacttgtcatatctaccaagtctgattgcagctggtctccgcaatcgtccagcatcatactgaagacggctagatcctctaacgagcaccacagccaacacgctaggacaacacaaaagtactgagtaaaattggcttcaatcaaggtgtcatctttggtgtgtgagttaccaaccagagtcactctttcgccatcatactcaggccatcatactcaaggcaaatgcaacagagaccaagaacacgataatgcatagactcacattgggcatcacaggaagtggaatcggtaaagaagcgtgtgtcgaaggagcagctgcagtagtttgccacttccacggtccccagcactagtaccgcacccgagcgaattcttcagagcttagttgagaatgttggctttctgagtttccagtagacggctgacgacaatgtcacccctgtccgattccagttgtccgtctctgagcccgacctcgacagagacggcgtgaatgcgttgatgacgggctcgagtgagagaggacgtggtggaggggacggggccgtctttgcgcgactcgaaatagaaacggtggcatgtgcgcacgacatttgaacaattactgtacaagtcccagagtctggtggacgtcccaagatctcttccgttcttgctagcagagatcaccgattatcggtgatagaccttgtatggcaatggaactgtcaacgccgtctaccatcctcatggttgaaagttagtgggtagacgaagccgatgttgtggtggaggagcgaacgactttgatgctctttctgatacgcccgatgaatatcattgaagagcaagcaccgcgtcccatctcggtttcaccttggtaatccacggatgatctgattctatccattatttcgccgcctccatgccgaactattccttccacctttccgtggcggggcagaaaatcttggtccaggactgcctggatcggactgtcgttgagatgtcatgtaactcgaacggtccgagactttctggcgcttatcgttggcaatccatggaagcactcgtgacggacaaattggactgagcttagttagcttcgacacaggacagacagggaccgggggactcgtgacttccaacacccctccttgcggatgactgggaagtaagacgttcctcgtcagcaggtttccatgtcggccgaaaggtcgatccattttacgcagacttctgttttagataacgaagcgggggtttcaacgatgcacgtcatatggctgaggcgacaaattccctctatgaagtcaggtccacaggtgagtgtttcatcccagtgccgccggaaccgccccgcgaccgcgagcactggctgtcaatctcgcggcaaaggcgtgagaaaagggcaaaaagaatgaccagcatgagggtcgaactcatgacctttcgttatacacccgacgatattagacgaatgctctaaccaactgagctagccggccggttatgttttcgctcgcaacgccgaaacataattcaacaacaacaatcgtcaacgggtacccagcaatcctgagttcaactttcaaaaatccatttcatcaaagaggctcaacctagcgagatagaagtgaaagacgacctacacagtcaaggcattcttcaatgacaatctcaccctgttcagaagatcagcttggagggcctattgtcagaccttggcatacttcccgatcaatttggcatggtgaacgtcaatggcccttgtcgtgtcaggagtcacgtgatgtcagctccgcagtgattcctttgtggagctggctcggaagtataatcttgattccggcgtgtccccccccttgtgtgtgtacggggaccaggccgagttcgccacaactatcgctcgacctcgccagtaaagagatatataaaggtatcaccacctacaaccacttcaccgtctagtagtatctggaacgtacatattccagtccgctttcgaccggcatttcactttcaatctacattcaatacaaaacaaacaaactcgaaacatcatgggcagccctcccaagtacgaacagatccctagcgacgacgtctacgaccatgtcggtgacgtggaagccggtcttaccaactcgaccgccgaaggtgtagacagcgtcatctacacctatgctccgttgttccctcgcaagggaaagactgagcacgttgtcggtctcaggggaaagaacaagcaggtcagtccgacttgatctcgtcgatcaatgcgtcgacgtggaacctcgagcgcgacgactaacccgacgtgtatctttcgcctttgtacctactcgcaggaaactatcgccttggtccaccgctacttccccactttgatggcattgtccaccgatcgactcgcttttgaagtccccgtgcccaacgctgcccccgtcatcgggcagaggatcaaccaccctaacgccggtcccggtgaagagtgggccaaggttcaggacgaggcctgggctggattcgagaggagcgctcccgctaggatcagggtcgtcgtcgttgacactcccaaggatatcaggcgacgtgagttggtttgcccccccgcccggtttgacatatgtcgttcgtaacgtaacaactaacgacctcctttgtatcttttgcgacccgtaggagaatgccgaacggcgtttgccatcagcgcggccgtctttggacctatcctcttcatgttcctcttcttcgtcgccatgttcgtcctggccgactttgacgtctaaaacgctcaatctcaagacgggcgcacctacaagattgatattccgcgtttcaccgtgccgataccaccattccccactcatatttcacatgtagcactcctcgatcagagcacgaattcccgcttcgcctttgggacgggaatcagacatatacgcacgttcccttttcatcacgatccacattcttgtagtcgcagaataccttgaagtcgttacacatacacgcagagatgacatgcatatacccccacatattgtcgtttttggttcgagttatgctacagagccacctcgaagcgagcaatctttcgtgcctccaattccttcggccgacagaggcacgccaagccaaacgacagtcatcgcgccgcggctgctgtctgaccggtctgcttagcaaactcgagacctgtgagtgatccttttccatcgtgatatccggtcgtagtatacacgggccggcaaagaggaccctttccttacaacgagacgtggctactatgcgggtctatatccggtttcctcttgcattttctctatccctcccgcctgtttcacccgagcctcttattccgaatgggtggcttgcgatacctcggctcattgctggaacgcgtcaaaggcgatgggcacctcgttgaacaagtacgactgcggggcacgacaaacgagcagcatcagtgaccatgaagcagtgaatggaggcgagacgactgggtactcacgacggattcaccaaagtgactgatgagcagagaagcacgaagagacgcgtgagcttcctctcggtcactgaaccccacagacgacgtcacgtagactcacctccttcggatgacctcggccagtaccagactgatatctaccacctcgatcttgtcgcatgccgcggccttttcaccctgaggaatggtattcgtaacgacgagcttttccagcccgctcccagcgatgacctctagtgcgggtccgctgaggattccgtgggtgacgacggcgtacacctgggtcgcgccttcctccaacaagcgtttagcagccagaccgagcgtcccgcaagtatcggccatgtcgtcgacgaggatggcaatcttgccgcgtacggaaccgacgaggaccatcctggcgatctcgctggcctttttacgttccttgtggaagagggcgaattcgacgttgagccggtcggcgatcgaggtcgctctgaggtcaagctcgagaatcatgagcttcgaaacgcgaggcgcgacgggcgaccacaagacttaccgcttggcaccgccggcgtcggggctgacgatgatacagttttcaatgtccaagttttcccgcatccagtaaatcattgaaggttcggcgtaaagctgcgaaacaagaatcgctcgaaccggcgttcagcgctgacgctacccatgaatcaggttcaaaaggcactgtcgctcacgctatgagaacgggcacgtcgagcggttagcatagactctctccctgcggacgacgccacgcgcctcacttgtctacgggaacatcaaagaacccttgaatctgactggcatgcaggtccatcgtcttgattttcgacgaggacgatcagagaaacgagcatcaacgtgtgtttcaccccgcttcagtgtgcccctgctcggctgcggactcacgatgacgtgatcacaccctgcctctctcaacatgttggcgaccaatttggccgtgatgggcgctctcgacttgtccttcttgtcctgcctcgcataggggaaatggggcatgatcgcggtgaccctcctggccgaggcgatcttgcacgcgtggatcatgatacagagctcgagcaacgacgtgttgatcacccctgcgccagtgttcatgatgtagacgtcatagtctcgtacggattcttggatcttgatcttgctctcccccgagggcgtctgtgtgatctgggccttggcgagggggatccggaggctgtgacgatcaggcgtcaggaaccgactcgagctcgggacatcctaccacgcaactctgacttaccgtttagcgatcaattgcgccaattccgggtgacttgaccctgattgacgacgcccgcccgaccgaggtgcagcgattcaggggatcaggtgtatatgtcgaattggaccattcgtgatgtgagaatgaacaaagttgtatggggggatggatcgtcgtgtcgcatttagcgtcgggccggataagggtcgaaatcgcgtgtcagggtcgagtttcgggtcgaacgccagtccgaatgacgttttcgagcgacgagcgacgagcaagacggcgtccgggaggcatacgaggaatatatgtagaggatgtccatgggatgaaagcgaccgtgagctaaagtcctgagtgcgcttataaaggttcacttgaaggtccacttaccggaaaagagcttgatggtcgagtaggctgctgatgacatcctcgtcggtccgaatcgctaagtcttcacctatccgtccgttttctaacaaggttcaccgggatatgaaggggataccttcaaggcttgtagtttggtataatcggcgagcgagaaaaacgatctcgaacgagaggtcctgaacttgcgagctcgaatcggcagacggggataagccgtggatctcctaaaagtgtcgtcaacgtcgttgttgatttagagctagctagctagttcggtgtctaaatctcggcggagttgagggaacaagaggttcgaaagaggcaggatgtcgttcaggaatagtttgaaggttttacgggtgggtcagcaattgacgtctatgccatccctgatctgtgaggctccgatgtgaacgactccatgatcattaaagtgacgggaggtaggtagtagttagttggtttacaagtgagttgattaggaaatttgagccgagacttgaaggaaaccgcggggccagaggagggggagggaaggatggaggaagagggaggcttcggaagtaaattaaaataacggcatcatcacgcttaggagccaggtcgcgtggggatcggaagcaattcagcgaagttgccggatgacctacgaaatcatcttgcatcagatcagcatcagccgagatcaggtcacggtcgccataatcaattaggtcgccacacatatctgacatcgatgcaaaccagctgaatcgatatctcatcagcaaacacctcgtgatatagcagaatctcctggaagaccaatagtctcgatttgaactagcaagctggacgcatacacgccgaggaggccaggaagtgctcgtgcgatcgaattcgtaaacaaacgtcgacatctcgactatcaagctggtccgaccgcatcgtcacgatcaggtgaacccgagtcaacgtatcctccctcttacgaattaggatcgaggaagggtccatcagacaggacctgaccatcttctaggacgggtagccatttgtagccccacgaggatgccggtctgctgaggcactcggtgaaacgatcccctactcgtcatacgaacttgctttcccaggtaaacccggaaccaacgacaaaatcgaccaccatgagtgacccagccgcggaccttgagtcagactctcccgcacatcacctccttcctcttccctccctatccagcaaacttcacctctccccttacaaccacccgaccccgacctccatctccaccccgacttacttgtggtgtgacatcgaccccggcgttcttcaattcggtcatcagctatcaagcaagcggacgagcaagttgggagtcgctatcagcagcctgtgttgtgaagatgggctggggggcatcgaggttgcagctcacataccttttcgatggccgctcgaaagtcgctgtcaaacgctagtgacatcatcgtcatctttgaaggtgggctggtcatatccacacctattcaccaggagaggacacgacctgattagcaaaaaagcacgatcaagtgagagctagccctgcatgcccgactcgccctttttcttggcaatctctccggcctccttgagcgcagctacagcccccggactgttcttcatgacgtcaaacaacgggctcttggcgaacgcttctgccatatcgctcatatcagcccgagcggtcgaggtcgatcggaacgtcctcggtgtttgaacgaggtgggtgcatggtcggagtaccgctgtcgaacggataggcagagtggaggcggttcggatggattgtcggagtgcgaacatgatggcagttgaactgtttgcaaggatgtttgcctgggcgtagatatgggcgtagaatggcggtctggtgtgtcgcatctagttagctagaatagatagtagctcgatcctcttgaaccctcgtcgccgttgcccctcgagtcttgatcaagtgatgacgaaagagttaaatcacgtgaaaatacaagataggacagggattgacttcggaagtaaatatctcgtcatccccccgcatgtttaccggaagtatattctcatcgctttcgacccctattccacttcggacttcggtcgtccgttcctcgttgcttcggaggattgttgcactttgaccaccgtctaagatgtcgattcatgaagaacattgaccatctatccgaccttgacttcgctacctgaattgtaaagcctccccaatataaatatccgtatcgatccttgtgtacccagaatcaaaaccacgatgcccctctctatcgacttttcaggcaaactcgttctcatcaccggcggaggccgaggaatcggattggccatcaccaacgccattgccgaaggcaagtcgagaccatctctttcccctcgactcgactcgccattttacaccctgacctgaaactccactctccccttgatgacacagctggagctgatatcgccatcacctacacctcgaccgacgctacctcgatcgccgaggagatcagcaagaaacacggcgttcgtgtcgaggcgttcaagtgcaacgtcaactcgagcaaagagatcgaccagacggtccaagatgtgcaaaaatctttcgaaagggaggtggacattgggatcaacaatgccggtgggttccacatgcaagtgtctcaaaagagccctgaggtcgagcctactctcctgtcgcaggtatcgcgttgtggaagtcgtctatccacatgaacgatggcaagcccgcttcacttctgctcattttctccctcaagtcctaacccatctatatcctcctcctccacctcgttgacgatccgttagacgagttccaggacatcttccgaaccaacacgttcggcccttactacctctcccgcgccctcatgcgctcatggctagaccttcccatcccgctcccatcttcttctgatcctggttcctcgcccgaatccggaatctctgcggacgacggcaagcccaaaaagaacctcaaggggaaacagatcttgttcgtctccagcatctctgggttggtagccatgacgcctcaatatcaggcggcttataacgctagcaaggcaggggtgaccatgctcgccaaggtgagtcccgggctcggtgggtccgtcgtgactcggcgaatgtatgtcgatgacgatggggttggattgagtttgcagagcttggcagctgaatgggccccgtacgaggtggtcatcaattcggtttcacccgtaagttctctgtccgccaacccagaaccgctcgaacctggtccgacgtgaccccgttcgcctgggtcttttttttcttcttcaaagggatacgtctcgacggacatgatcgccaatcccccggacgagcaagcacgaggatgggtcaaatcgtgggaagaacgtactccaatcggcaggtcagtcctcttctccgcccaccctttcagacctctctttccctgttccactccaaccctatcccactccgacgctatgacgacggcaagatgcaacagctgagcgagatccgactaccaggttcgcttcggcggaagagattgggaaattcatcgccgtgctcttgagccagcacgcggccggggctgggttcatgaccggatccgatgtcgtcatcgatggtggtaagtcagggagatactgtcggtctcgcattcacagtgcttatacagctggtgtcccgcaggatatactttgtattgagcaaacaacgggatgggttgtacgagacatttgggtaatttgatcttgaacgtaaaacggtgaactttctgtcccaatgccggcaaatgatactacacgcttcaagtgattgccaagactgtactaggactgcacttgggggtgtttatcctctagcacatatggttgatacctggcttcttcaccgccagcaatcgattctacgtttgagtacaacctgagcctgtccctgatcgagctccttgatatccagcaattcggtcagacgtgaatattgcgagtcgaacgccatggcgacgccttgggcaaacgtcactggttgctcctctcgagtctcggtcggtagagcgagcaaacgagccgtctcgctgaacgcctgccaaggtaaggctggacgacggatcccgtcgcattcacgtagtcccaacgtcgaggcctcgatccaagcgttgctttcggccacgagctcttgtccaccgtattcggtaaacttggaccatccggcgtatactgcacgttgcatgatgtggttggtgatgtgggcaacaatagcccggtagaggtgaccggtcgcggtgaccggaagcatgcgagcgagatgccctaggtgtgccgaaagcgttgtcaacgggccgatgagcccgatagtcgttccctccttgtccatcgatgatgcgttggcatcccaccgtctgcaaggccagtatcagatgcagaaagtcgcaacgagcaggactatatgactgaccttgtcaaatgagttcggaggtccctctctacttcggcagtcacgtgcttgacgatcatgctctcggctcgattgaccaaggtccggtactgctccacagcgatatcatatgggttggcgccatcttccacagcgataccatcatgtctggcgcgggcggtatagtcggggctatccgcaatgtccgcaacgagatcgagatagagctaattgtcaaaggatgggtcagtaccaatcctttaggtttccacgaatccggccgaccccgtaccatctcgtctccccatctctccatcgcctccatcaaccacctcgcactgatccaagcctttgtcaatcgctgaagtcccccgactccgctggtcatcttggcggtatccatgcccatcccgttttcgcgagaatggccagcgagtgcgcctgggaccgcccgggcgaaggtcgaggccagagtctcaaaggcgtccaacgagcttgcgatacgcttccggtatgcatcaagaaggggtatctgcacctgcgctaggaagggatatttgtggcgcagagtgggcaatgaagcatatcgatctggaagaagaccagaaatcagcggttgctgtcatgaaccgcgatcgcacttctcacctgcgacctgctccaccagagccctgacttgtctcgaaccgatagtcggcttgaagtctcgacgtcgttcgagggcagattcgctttcagtgtcacctccctcgctgacgtcgaccagagtccaggcttcgggcgaactggtaatttcctcgtattgctctagcgcgactgcactcgaacgggtcgtcagtatcggcccatcacacccccgacaagcgctcccactcacactccttttcgccctgccaccatcgttcgaaccaatcgtccgtgttgaggatttcctctgtcaacccttcccactcgtcatcgccatggtccacattgctagatcggcgactttgtctcttcctcgtcgctttccaggtcctggatgcgttgaagccaccgcgtctgatcgagtcgtcgaacacgacagtctggtagacggtgtgagctagcaatgatgggtgaggaaagaggtgcgggaatcgatgtcggaggagggccaacggcagcgtcaacatctgggcagtcaactcggactgttcagaaacggaacgtggtctgttcttagccagcttgacctcgattgatggacgatgctccatggcacttacaacggcgtcgatgtccttgaaggttgaccctgttctggtgactagcgcttgcaggtacgtctctgcaaaagctcgctgttcataaatcgtatccaacacgctcgagaacgcccactcgggctagagtcgaccaacgaaatctatcagcatcctcgtggcacaggacttgctatgcgcggccgaggtggaacaaaccttgtccagcctgttcgtcccccggtcaccctcaaagtgaaaggcgaaccgttgcctgacgggtccgaccatggctacgatcgggtagagcccgttctcaatctcgtcgtcgaaactcaggactgatctcagctttacgggcgtggaatcgacgagtttgatgcccctaatgaaggatcgatccgtcaggatcagtccaacgaggtgtcaataaacaccgctaactgggtggcagactgactcttgttggaggacgagcagctctttgaaactcctctcaaatttcctcctctcgtctgcgccgaccgactcgtacgtgactcctcttcctggccatccgatcccatccaacgcgtcctccaacgccgaccacccccacatcttcatctcccgccagacctggcgatgaacccgctgtgcgatcttcaagaggttaaagtctgccggaaggcttgaactgagatcgacgaggaggttgtggaggttcttatagggtccgatactgggcaaaggagatcggcgggaagtcccggatgagttccctagttgacgagcttcgagcgtctcttgcctgtacgtccaccccaagtcaagggcgatcatcagtcacaggaaaagtacaagagcggccgtgttcgccataaaggcacttcgagactcacgcggagagcatgatacgttccaagactcccatccacttgattcccaacccgagggcatccaaactcgtcctagccttctccatcctctcgagtagcgtcagcgtgtcttcttccccgtttgttccttctgcgctgtcgagctgaggagagacgagttgacccgtcagtcggccgagatcgtccatcaatgcgtagcgcgaggaagagagctgggttatctggacgaggaggtgtgatagctgggtttgggttttagcgtgcaagggcgcgatctccgagtttacttgtgcgagctaccagaaggccggatcgggatcaagacgggttttccaacagatccggtcagcggagggttcatgatgaaacaatgtcgatcgagaggtcgagacgtacagcttcagtactgctcgtttccacgtccctccatttctgaatttctgcttgcaaggccgtcccccccgaacccgtcttgtcgagctcttcctccccattcagagcgacctccgtatcatcctcatccacatccaaatcccacccatcctcttgcatcccctcgaccccatcctgtctacctccttcttgcgtcgaacgggaccccgagcccgagcccgacgcgcccgcagagagcctgacgaggtcgtcccacgtcgagtaccgctcgttcaacagcctgagcacggaatggtcgtattcagacgggtcgggttgatacttcaaattttcgagttgttgggccatggtcgacatcgtcatcgacatcgacatcgttggcagggtggaagaggtttcggttcggaagggggttctcgggagatggggggtcaggatgacgtcacggtcgatgaggtggttctggaatgtcaagattgacaaggtgccgtagtggtcggatcgccccagaaggcggaggagctcgtgttgattcgctctgagacttttctccagagcgatgtatgccgaggatacagaccgagctcggtgtgtcgtctcgtcggtcctcgtctagaacttggaccgtcgactgatctcttcgagtcttgagagttcgcctgtcgatcctggttccaggcaagcgaattgttgatctatcgtttctactaatccagccgcctatcgacaagaggatcgaggtattgactggattgaagtgcgacgacagtttgagaggtgggaatggagattgattagcagcttagctatagctctatagcgagtgatgatccgagtaaatgagcaccctctagtgtagtgtagtgtttggatattatttgattaggggaagcctagatgacacgtcataatgacacgtcataggatctgtctgtcttgaccataatctccatcgctgttatcaaaataatccgatcgatctatctatcgctactcgaccccggaccctcttactcatcctcggtcggtagcacaaggagtgagtggtacaactcggataataacatgttcaaagatgaaatacctttaatacctcagcagacgtctttcggccgatcattcacgcaacacccaccaatcctgttttcgaacttgaccatgtctgaacccgcggcggaccctatcccatccacctcgtcttccccgcccaagtcctcgacctcgacttcgacgacgacggtccctttcacgttcaaacgaaaatcccgccctcaatcttcccgcaaacgtaccccttctcccgatgacgtcccctcgagctcggtgatcaaacctacacagcgtacgacgctcaacccgctcttacaggggaccaaacggatacgagaggccaggaaacgtgaacgggacgctgaagagcagttcaaggcggacgagagttttcaagtgggtggggacgaactcgttacccgttcggccgagtgggatctcacgggcgatatcggggactcctctgatccacgcggtagtggtacgggtgcgatcaagaggccgaggttggacgaggatgggaatatcctcccctcggatggcaagtacaagggattagggtcgtatacgaatttcatcaagctggatgagaggcaagcgcaaatgtccagcaagatgaaggctgggcctcaaaaggcgagtgcgaatatcaggagtatcacggtgacggattaccagccggacgtatgcaaggattataaaggtgagtcgtcgtcgtcgccagaccctcgctccagcaagctaactcctctcgtcatcccccccccccccaaatccccatgtagagaccggattctgcgggtacggcgactcgtgtaaattcctacacgaccgcggggactacctcgccggctggcagatggacaaactcgccgtcaacccggtgaccggtcgtcacgagaccaaggcggacgaagaggaagaagaagaagagatcccgttcggctgtttgatctgtaggaaaccgtttaccgaaccggtggtcaccaagtgtggacattatttctgtatgaagtgagtgtggtcccggtcggggcaggactctcccgtggtcccttgtgctgaccagactacctcgcgtgtgacagctgcgcgatcacccggttcgccaagacccccaaatgttacgcctgtgggacggctacgggtggcatgttcaacaaggcggaaaagatcctggcaaagatggaaaagcgcaacgaagagcttcgggcaaagaaacgacgcgagagggaagatagaggggaaagcgagcccgaggaagagggcgaggaggatgcggggatcgagtttgggggaggagaagacagtgatgcagagtagcgcagttgttcatgatgctagtcattcatcgtctgtcgagccggccattgttgacatcaagctagtagtcgagcaaaaggcaattcgggagcgggctggagcctatattgtagcgaattcacgcggaccttcgatcagcttgtgaacctcgtgatcatccaggatgtttttagtgacgtaccagttcctctcgtcgtacaccgaccctttggcaccctcgatcatgtggaaagtatagatgaacctggtcttttccgacaagttgtgcggcgattgatgctgcacgttgcctaaagaaatcacaatcatacgcccaaggtcagtatgaagcgtctgacttcgaggagggccgtcacgggacttgccgtcgatgaggacgagcgacccggctttacacgtcgccaactcccaaccgggttccttttcccaatccacctcctccccaccctcttccccctctgacctctccctcccgttcttttcgtcccagggaataaaccccgtgcctccctcgccaccctctgcacggctcttcatgcggacgaaccgtttccccacgttacttcgcgggtcgacgtgcgagccaggtaaaaaggagagggccccgttggattccgtcacgtcctccaaagcgatccagaacccgactgcactcgcagggtgagtatagaggaacgtcgagtcggtgtgaacggggactttggcaccgatcttgggttgtttacagatgatcatcgattggaggactgcgcgggttcggacggtcagctcgaagaaccgcttcgtgacattgtggcgggagactcgcctaagggatcgtcatgttcccccagttcccgggcgacatccttgatcctctcgttctccaaggtatacttcttgaagaccgggtcgagctgacacaacgcgtgtccgatcttgttgacgctctgggtcttggggaccgtgagctcgggcttcgaaccgtccgaagacctcgagattgagctaggctcgaggaagaatgaaatcttgtcgttggaggagaggaagtagtcgtcgccgacgtgtttgccttgttccgaggtggagaacgttgtctgtataggatcaagttgcgtgagcgacagacggagtaaacgcttattgcaatgaccaaccatagggtgatcgctcaagtccatctcctctatcagctttttggcttgattgagcatttcttccgaatctctcagggagaaaaagtctggaatgacataatacctgacagccacatcaacattgccgaattagttgaattaggtcaaagccgattagtgcagggtctgtctcacccgtctttacggaacttggcaacggcttctttgtccagtataggcatttctaggatggtagatggctcaaagcgtctcgaagcaatccttggggggctcgtaatacgtagctatccaagttggtgacatttgaaggtgccgttgaatccaagtaactgccacctcgacatccaagatgaccttcaaccgaccacccgaaggttatcgggcttggccgagggtaatttgcttccgcgaatttggcgatgaaccttaccctcatcgttatcgatgccgctcattacgcaacgctattcgtttcagttattatttgtcaccaatcgatgtcgcaagtagctagtaggaaattcgtattcatcacttcagagcagatcagttgagctagctcgcaacgaaatgcgtcgacattggacacgttcgccgagtttgtcactggtcctgtcgctagtcactctgcttcaagtacaaccgcttgcggctggtaaccaatcacaaagtgcagtatgagcttctgatcgaacagttctcaaacccgaacatgaatgatacaatgatacaaaaaacatcgatatagaccgaccattcattcgagctttcgccatccggaattttattgccgggttagtgggagaagaccaatctgaagtgcgagattatgatccgtcattcgatccttgcgtcccttgtatcctgttacaacggaaaatctgtaggcgccagctgcagcgctgagctcaaatgagggtttctgccagacaaaggaagggtaatccagtggtacagatcgcatggcaaatcgcattctttgctcctcgagcaaaggctaatgaacgaacctagtatggaaccaagacagattcaaggtgccagccggttgagcgggcccagcagttgatgctggacatgacaaaccggccgagtcgacgccgttttgcgcttatcgggggccgcgtttacttaccggactgttgatcccggtatagagccggccggtatcaattgttcgatactgattattcaacagccggagtacgtctgtccacaccagaagatatatagctgccgctggggagatcagggactgtattcctgaggtgttagccttgaggtctatcatctcaacccccacttttacctccttccggtctgcctgcaacacgatccgacgggaagccaccaaagccgacatgatcgacctccaccccgagctctggctcgcgcactacatgccctctcccccgttagacctctggcctagctgggtcgtcaactttacacggaccatgaagggtgggaagatccctcctgatatcgtgatccaggaccttttggcccccggttgggtttcgaattcgagtaacaacgaacgcgatccgtcgatcaagctcaggctatatgccccggcgaggtcgacttcggagcgtctacccgccctgctctggttccacggtggggggtacgtcatcggtgggcatttgatggcgcaagacgtccacttcgaacgggtccgacggttaggcatcaagatcatctctgtgaactaccggctgggcccggagaacgcggctccggcgggcaacgatgatgcttatgccgcgtggacgtacgtcatggagaacgccgagacgttggggatcgaccctaccaaggtggtcgtcgccggacagagcgcaggaggggggatggctgcggggttgtgtcaaaggatctacgatcaaggtggcattcaaccgctgagccagtacttgctttaccccatgttggatgaccggacggtcttgagagcagactcgatacatttcgtgtggacgacccggaacaatcattacgggtggaagtcgtacctcggacaggaacccggttcgacgtctgaaccggtacgatactcggtccctgcacgacggaaagacctgtccggtctcgccccgacttacatttcggtcgggacgatcgacctgtttcatcaagaagacgaagagtatgccaagaggctggaaaaggccggtgtgaggacacggttcgaaacggttcccggggggttccacgggtttgagggtcttccctggtttggtacgacgtcggtaggaatccgatacaaggaatcccaaatggcagcgttggcaagcgctttcaaagcgttttcgaacgagaattaagcccgaccaaactttaggaaagcgtcagagcgagtgcttgggtttcggaagctggcagttggcatatatgtggctgtgcttgtaaatcttttgaagcgggacaagagcaagatcgagttgtagatgaaggatggcatatcatcgcgatcgaagcgaccaaattgccaccgcgcaaagggactcagtcccacccaggtcatatagctatattcctctcatgcttctcctgatcaatgatcatttacccgctatatagtcactacaccgccagcctcttgcctcttacgcatctctatagtcattctattacgtcatcacggcatcagtcatgacgttatttacgtcattcttgggtgtagttttataattttcacgtgattagacgatcctcgagattatgattcagtactcaggtaagttgatctagcgatctaccagctacaacagccaccgacttgcgtgcgacttgattgaccacatccacaaaccatccaaacaggcctgcataactcgattccagctcttgtgcaaaactccctttcgatcgatcgatacatttgatcgacctttcttgacagccatgtctccggccgtcgccgaatcctctcgagctcctaaacggacaaaagttgaagagcaaaagaaactgaaatctcaaccccgacttttcgctccctttcgagcgctgggattcatcacgaaccatatcccgttcgcacttcaggtcaggcaggccaagggagcgttggaaggaccgaatgtgacgatcgtgactagtttggggaacagctgggcgatgtgggatgcgggaaagatgaggttgttattcgtcggtgagttgtccagccacacctgtcttgccttgccttgctacgccgtgtgcacaagaaacgaggcctaacaaggcctctgcttttaggacctccaacaccatcacccatcaccagcttggctgttcatgggaacgacgtctttgcctcgtccggatccaccgtacaccgttacgtccgtggcaaactcctcacctcgtacacctccccctctgtgaaccctggcgagatctcccagattctcatcctcggtaacaacctcctcgccctctcttcctcggcttccacgctccaggtgttcaacatcgctacgaccgagttcgagggcgaggtccagttttcgaaagggttcgaaccgagcgtgatggtccatccgagcacgtacgtgaacaagatcttgatcgggagtagggacgggaggatggggatttggaacatcaagacgttgtaagtccatcccatcccggcgtctgctccaatccgcaatcgccatggtatctctcgaggaggcacacacacgtctaacctgacctcgctcgacctctcttcggtgatacgctcgataggagctcgattcacatcttccccgcgctcaaccctgcctccccttcgccgataacgaccctcacgcagtccccggcgatcgacgtcgtcgccgtgggtcacctggacgggactgtccgggtgatcgatatcaaggacggggaagaggtgctcaaggtgcgtatggaggggaatacgggggaagggatcgtcggtgtcgctttccggatgggtgagtccattgcggtgtgatccctcctgctcacccccaacgcgcggaggggggcttgaattcgagctcgagctgatcttgttcggatgacggtgtggtgtgggcgtgtagatggaccgcctatcctggctacttcttcgacggcggggacgatcgccgtttgggatttgaacgccaaggggaagctcttgcatacgatccgggacgcgcacgaggcgggagtgacggggttgcagtttgtcggtgggctgttgatcagtagtgcaggggacaacggtgtcaaggtgcgtcgccgaacacgggaggtgtcgcgggcaaggatcaggggctgaccttgttcgggggcgcggactcgtagcaatgggcgttcgactcgcctaccgctgtacctcgactcttgaaatcgcggacgggtcatcactcgcccttgacctcgatccgttactatggacaggacggcaagcagattttgaccgcctcccgagatcgttccctgcgatacacttcggtggtacgggactcgaggtcgttcgagctgtctcaaggatcggtcgtcagcaaggccaacgcgctcggcgtcccggtcaagagcttgaagtggaacccgatcgtcaggatgagcagcgaggtcacgcggagcaaggattgggaggacgtcgtcaccatgcacgagggggacgcttatgcgcggtcgtggaggttgcaggacaagaaggctggtcgctgggccctggacgtcgaggacggcgcggtctcggccgtatgcacgtcggcttgtgggaattacgccctggctgggtcgtcactcggtcagattcggatgtggaacttgcaatcagggcaggagagaaagacgttccaggtcaacggggtgccggctccggtaaagggcaagaaacaaaaggtggtcaaggggaaaaaatcggggagcgcgattacgggactatgcacggacgctctgaataatgtgttgatcgccagtaccctcgatgggtcattgagcgtgagtcgattgtgcttgcatcgggctcggatgggagcgcgactgactttggtccgagttccaacccgtagtttttcgactttttcacgacgaacttggagcacaccatgaagatgccggccaacatcacctcgatcgagcttcatcgggatagtggcttgttggctgtcgtatgcgacgacctgattgtccgagtgttggacgtcgagacgagacggatcgtgcgagagctaagcgggccgagaagaccgatcttggacatggcaagtcgatcgctcgtcccagcatggcatctatgctaatctcgtgtcgcctcgaacagaccttttctccagactcgcgttggttgatcacgagctcgatggattcagtcgtccgtacctacgacgtgccgacgggtcagcttgtggacgctttccgggcaacgagtattgcgaccggagtaaccttttcgccgacaggcgactttttggcgacgagtcatgtcgacagcgtgggggtgcacttgtggtacgtcaagccgagaccatgccccgcctgtacccatgctgactgtccgcaaatagggcgaacaaagcgcaattcagcgaggtggctctgcgtcatatcgacgagaacgaggtgaccgatgtcgccatgcccacggtgcaaggttcggatagcgatcagggtgagtgggacaggcaaagaggatacgcgggttgccttgctgattccaatctcctcgatagatctcgatggaatcgaacccatcggtgaacccgagttccaggacatttacactaccccggagcaattaggagaagagctcttgaccctctcgctgatgccaaggtcgcgatggcagacactgctgaatctcgacatcattcgagcacgcaacaagcccaaggaggcgccaaaggctcccgaacaggcgccattctttttgcccaccgtgacgtctctggacgacggactggggactcggttcgacattgcgagcaaggaagacgaaggggccttgaaatcaaactccaggctggaccttcagagcgcgtttgtcgagagcgagtttacgcggtgccttgcactggaaaagcagggaggccgatgtgagtctcgccgttgctaaatacaaacatcgtactagacactgatgcggcgattgttgaaacccagacgaggccttcttcacctacttgaaatcgctgacgccggctgccattgacatggagatccggtcactactatcgatcgaccacctcgaacgcttcctacgagctctaatcggacgattacggtcgcatcgcgatttcgaggccgtccaagcggtactcgccgtgtgtcttgccgttcatagcgatcttttgattgccaacgaagagttggccggtgtcttggagcagcttctggtcgaacagcgaagggagagcgagaggctgctaaacctcgtagggtataatctcggtaccatgtcattcctgagaggcgcataggcatttgtagggtgtcggtggttctatatgcattcagacaacgtcaacaatatgacatttaccacgtcgagcattcgggaacattcgtcgcgcagagacaggctaagaggggggttttgttttttttgcccagtccatcgcacgagcagcattcttgattgccccccccccccactcaattgcaaagagtgctttgtataggatctattcgtgtatttgagtcgtgattaaattcgctcaataccgtgagtgtcgcacaagaaaattaatgtactggactcttttagaacagcagcatccagagcgatacttagggccaatttctacgaattgcctatcatccgcagtactggaactaggatgggtttttcaatgcgtgtttgtgaagtccaacttcatcaagactttctctcggttggtaacgaaagatccaagtggaaactgggccaagctcatggctaggcggtatctatcacatggaaatagtcggttctagacatctccgaaacagcgcaagtcctgaggcttttggaggaaggacatcatcctcaccctttcccgctgagctgacgggtccctacgccctgtatacgaccatacactaccttatcgcactagtctcagaaatttgccactcgtgtgaaacatgatcgaattagggtgtgtccacaacgttcgcgtgaacgtagacttgtcgcgtaccggcctaatttatcgtgcccggcctttatcgtctcgcgtttcatatttacaacctgagaaaagatacctgtggatacaacccttgtcccgcgatcatgctcgatgcttgcctataaaattcttggtggcgctcttgaaattcagatcgccccaccgctgtcgcatcgagtgggggctcggtgtcgttgcgacggcaccgacggatccgcccgaggtcgacctcgatctcggttgatcgtgttcgcccgattcctcgtcactgatccggggtcggcgtttggccgatgcgggttcgctgtggtcacctgctgcagcgggcgaaacggtcccggacgagctgcgtcgtggtgcgccagccatcaaccagtgatcgttgatgtcgacgggcgattttccagcgccagcggcatacatgggcgccttttgcttgagcgcgaggccctttttgcggtatgctgcggcacgatcctcgtagatgcggttgatggcagggatcgaattggaaggcgcacgggcgaccggcgtcggctcgaccgcgcgttgtgggcgactatcctgtgttttgagtgtggcattactatcgctcgagtcggtcttggtgacctgtgggcgggcaggtttgggcaacagggtcgaggatggcgcggcggcgtatgacctcgagacttggtcgttcgacgtcgacgcggcttcgctcgtgtcatgtgagcgggacgattgtttttgcaacaacaagctatcgccgtatgccgccaactgttctgccagggacgaggacgagccgatggcgattgactgcaaaatgtcctgctcggcgtgtcggactcgatccgccgccgtcttgtccgggtcgacggcgatcgccttggccgggaccgggacgtcgtagagcaaggccgggttcttttccttgcgcttgctcagtctccgtgccatgccctttttcgcgtgaatgctcgcgggatccagttcggattggtcaaaggtggcggtctgggagatgggggtaaagggggtaaagttggtgtcgtacgtcgaagtgctaaagttcatgcccgaggcggtggtcgagacggacgatacggagcggtttcgagcgcgcgtgccgctaggatgacgtttcgcatagagtcgactcgttgatccagcagcgattgcctcggatgatgccgtgggggacgcagggatcgggatcgacgagacggatccgaaactcccattcctgctcttgctcttgcgatatcgtcgcgcggcggctcggtcccagatgctctctccgacctgatcctgcttttcgctctgatgcttgtcttgatccgggctcggttcatgagcgacgccttgtcgctgtcgctcgacgtctttgagaccgtccatgagggcgaacgggatgctctcgggcatcgtggcggatcgtttcttgcccttggacacaggggtcgagggcaacgatcgcatggtcagccggccaggtgaattggtccgtttgcgcaagatcgacttgggtgcctcgcccttgttccgatcttggccgagtggacttggcacaaacacctcgcttccggagcgcgacaagggggcgggatagaggtcgtccgaggggttcgaccgggaccgggcgcgtgtcgcgagcgcggttgttcggggctgttcgtccgcctcgccgacgtcactgtcatcggctcggacctggtcgtcctggtcgtcggcggcggcagcgtcaaacgtcgtggttgtgggtggggccgacagcggcgtcggccccgaccacgggtatccgctcgccgtggtccctaccgaatgcaccgaatcggaaaacgtcacttgcgaggcgcttcgtttgcgacccgtatgaccgggctctatcgagggcggtctcgtcgccacggacccggtactcgacctggctccatccatgctgactctcttgatccgttcgacgctctcgtcaatgtcttctggcagcagtggggtgtgtgccgatctgggtggactcggagatgggctgggcggcgtgccataggggtccttgcgaaacagcgtcagcaaagccgtcctggacatgtgccgggcagtcgagtggatggacgagttcgagtcctgggcctcggagtattccgaaccgcgcgaggtcaagcggccgcgaaagttggacaattcggcggggaggaggtcggacgaaaacgacccaggacgtgaggaggacgacgtgaccgtggggctctccgtcgcggcagcggcggcggtggcatgcgactgacgacgcagactcgacctcctaaaaccgagatgccccttgccggccttttcaaatatggacgggagcgaaggccgacgcgaggacgccgagtcggtcgatcgtcgatgctcgatcggggacaggttgggctcgacggtatcccctctgccatgcccatcgtccgatggcggcgccgatacgggatccacggccgattcgcccgtcgtcatctgcagcatgctcttgcgcgctctcaagctgttgcgacgtttgctctgaaacatgttttcgagactgtgccggaggtgtgccttttgcgccgtttctcccgagccatgagacgtcgctctgtcctttttcgaccagcgcgaggtgggtcccggttcgtttggctctggggtcaagatctcttccggctcgtggtcgtcgaccttggcccgcatctttgccctctcgcgctcgacgagtccttcccaggcgttgagcgtttccaccacctcgtcgtgtgcattggcctctgccagcattctgggcgtgtgtccgtgcttgtcggccttgtcgtgaatcgctccgcatgctagcaagatgcggacgatggggacgtgcccgttggcggcggcgaaatgcaacggtgtcgatccggcctgaccgacgatggccagcggtggcggtcgtcgggtcatgcgggtcaagaggttgcctccgtgcgatacggacgacgaggacgagggggtcgaattggaccgatgattgccgaggtgcaacgtctgcctggccctatccgcgagcgaggtcgacccggatcccgaagccgagtcgttgttgtgtgcgaccccattctcccgctccttttgcatctgtttctgagccgcatgcaggctctcggcgtatcgtcgagggagtctcggggcgttaacatcggcgcctcgatcgatgagcatgcggacgatctgttccgagccggacgagcaggccgcgtggagggggaggacgccgtgcaagagcgagttgacgggttggccatgcgtcagggcgctgcgagtagcagagcagcaagggcgggttggtccacgaccgtgccatgtccagccgacacacgaccgactcactatctgaccaaacctacatccccgctcgccgccgcgctatgtaattcgaggttgggatctgcgagaccacacgctgtgattagcctttccctcgtctcctctcaaccagcccgcaacagaatccggacgtcaggctcacaatccacggtcacgtcatatttggcctcggccctctccactttgctgcccccacccccacctccgatgaacggggcaacgggggcaaggaagcgagttgtttacatccgcggtttacaactctggagttactcggcccacacacacacacacacacacacatacagacacgcacaacctcgtatcctctccgcatgatcgaatagacaaaacacaaaacacacagacacacacaggcacacacaaggctcttcccatgctctctctctctctctctctctctctctctctctctctttctactacacacacaggaccatctttttacgcttctaagattgccacgactcggacccccccgcttacagtccgagctcatccctgtaaacccgcgtcgcgcgtcgtcgtcgtcgatccaacccgaaagagttggtcgaatgcacaaaaaggagggagggggcggggcgcaaaagcaagaatgcggaatcatcagttatacacgagcgactcgactggggatccagacgtttgagcgttcgatctcggactcacgcccagggcaagacggccaagtcgccgacagctaccacgctaggcttggacttgaggagggtctcggcggcctgtttgattccgcaaagatgaaacagaaacagacgagacgagacgagtgttagccttccctcaatcgaatccacagcgcatcatccacccctgacgccaaactgaccttgctcagagtctcggccgagacgccggaaaagtcctgcgccttgacttcggccccgctaaagatcccaggcgcataagcagccaagagaccttccttgttgtccaacccgttggccgccttgaatttagcagccgccacggcccgctgtacggtctcgccctcgacggcagacttggaagtgagccccttgaacgtgttgacgacctctcgggcgagctccttgaccccctcgctcgtaggcgcggtgatcgagacgccgacgagcgcggcatccgagtaaggcaggtggaagctctggatcttgctaccagggaccttttcggcggccagggccaagggggtcgttcccgggacccacttgagggcggaagcgccaccgaccaattcagggatgacgctcaactcggggctgacgtcggtcgtaccgaaagcgatgatcatggtcggctgacctccagcgtggacgtcgagcgggactcgctgttcacccccaaagtacttgctaccgctcgaagacaagctcgatccggtcgacgacgacgatgacgaagcacctccgaaagccttggcgacggcctcgctcaaagcctcggtcgagattccggttccaaagacggcaatgttgctctttgcaaacgccttgctagcgtactccttgacgtcctgagcgctcaggggagagtggggagaggcgaacaacgagtttccgagtcctcgtcggaaagcgacgtggtgcgccaggtcgagggcgagggtggaaggggtacccatggcgttcagggtctcggattgcagagtgggcatgacgagctcggaaaactcgtgggggtggtatttcgaagccgacaggacggaagcgagcaccttgacaaagtgttccctgtggggcaaatagtcgtcggcaaggtcgattcggggtgagcataccgtcgtcaacatgtcgctcttgatccacgagacgactcactcgtctcccctcaaaaactcggcgttcaagaacaagtgctccctgctcaatccagatgagagaacacctccgtagagctcggcttcacggacaatcttcaaggacgaggcgttcgaggtggcctggcggttgaagcgggggggtagagtcagcaagacgtcatctacgtatcaagtctgtatggccatggcggtgagatgggggaaacgagtttggtcgactcgaatagtcggctatcatgaacatggcttcgagtcgtgtcctgacgtgttgcgatcgtgatttctgctgcgtcccgcaccctgcatcgaatatgttcgtctcaagtcactggtctacccagttgacaccaaccactcgctcgaatcgagtgacggtcctcctcccccatgcgattcccaaacgcgtacgatcgaacccgcaaactcaccttgaaagcaaagttcttcaaagcgtgggcgacaccgggcaaggtctcgtacctgctaccggccttgacgacgacgctgatcgaggtggtcggctgaccgagatcgacaccggcgaccttgacacctgccgagtctgcgatggacgtggcgtacgtcctggtcgaacggttgacgacggtgcggagggcttgagaacgggcaaacatcgtgctcgattccggttctttttgttggggaaaagggggggaggagggaaaagacgaagcgaagagggacagaagaggagtgtgtttctgtttgagggtggacgactgtctatatgatggttcgatccgatgaagtgtttattcgaatctgcaatgtgtcgctgatgtgctcctcgaaccttgagagcgtcgatgaccttttcggttgaattcgattgggagagaggagacgagagcagaaggtggctcagagcctgacatcttcattggtcattccccacttagcgatccgttccgcgggttgacgcgcaagtcgaccaatcaccacgtcgacgtcgacatggtcgcttacggcacgggtatcctggagaatcgagttttgcaaacgcatacgatctagttgaggatcaatccaagtagtcggtacaatcgcatggcgaatgctcactagatcagatcgctcaacagaatccgtgtgatcggttccgcttcgaacgggcgctgttcggcgcagccagcatcgagaccggctgacgcacgagcaacctctcttcgggttgccgccccgcccccggaccggtagctgataaccatgcaccaaacaggctacaaaggagagatctgacctctgcagaagtcatcaattgaatgcagaggaaatatcccttgaagcgtgcttcttccgagatttataatggccacattctgaactgtgcgcatatcacacgtcaggaagatcttgatcaattgcctgccatgtaatcccacacatatagctttcaaaccatcaccgtccataagctaccatccaatctcctaccctggaccatttgcgacgacgcaggtaacaggcttacggtacgatcgagatatccatctaggcaaaccctcacaaggtgaaacaacccaccttcccggctcgcctgaggctcaagtccacgaaaacgtgttaggctcactggaaaccaaaatccgagcgagacctcgaactcgaacttggaattgttcgatagagttatttcaatctctcgacacacgagaaacgagacctccagcctcagcttgatccatacatacacctctcagcaccatagtcaacgtacaggatgtcggtctcaagaacagttctcggtctcgccgtctcgtcagctagggcggtgggcgtggctcctcgagcagcgggatggatgggcaagatgagcatggacagatctttctcatcgtacgtcgttgcgaagtcgcccaccgtatagactagcagtcggactaactctcatccgtgttaatatgcgaaacaggtccagccgatgtggcgagactaccgcagagtcgtccacctcgagctcggcagcgtcgacaatgacaaaggctcgccaaagttcgagctcgacatccagctcctctgtcacccgtgtggaacctcttaccgcactccctcccgtactcccccggacccacgggatccaggtcgcccagatcaaactctactcgcacaccgctgaacccctcgagcggttctcccatttcgccctccacaccgcccattcgctcgacatccccgcttcccgcccggcttccctaccccgaacccgatcactttataccgtacccaaatccccattcgtacacaagaaggctcaggagaatttcgagtcccggacgtacaaaaaggtcatcctcttgtacgacgctcaccctagggtggtcgacatgtaccttcgatacctcacccagaactcgatcgcgggtgtagggatgaaggtcaagacgcacgagtttctcgaattgggagtaggaaaaggagaggtcgagggcgtgttgaagcggttcggacagtcgagcgaggaagaggttttgaagcaagtagaggggctcaagagggatctcggagaggatatcaaggtggacctggggaagaacgagtcggcgtcgtcgggggaggaacaaaagtcttgagtgtgtggtgggtgatgacatccagccccgtctgccctagaccggatcgcgatgacggtataacgatcaacttgtaaaacactatagcatcttttctgatcgaatcgcaggtatatatctatgcggttagtttgacagactggggacaaagcataggtagcagaacgtggccttgtggggctgcagcctatcgatcacagtcacagtcgttggcaaaagtgttggagagcggaggttgccttcacaccctcggcaaccaatgggtcccaaagtgtcacggccacttcttcgagagcgattgggaaggatgctgccaacattttggacatcggatgggcgacatttttatggtttccaagggtgggcgcatgcgttgtcaacagccggcaagatgtaacaaggggagattcccacacaggccatacttggggagcgtcgatttaccatatttgatcagacggcagcgtagactctccgtcaaccatcccgaggacgccgatcgatcgattagatattgaaagtcgtcgaccgaaattcagttgtgaacagatggctattctttccaatcacaggttgctgaccaccacttcgaggagtcacgcagtactacccgatatagacgatcagggaaccttcaccatggaagaagaaggtccggatctatcctatctggatagtctcaatcccgctcaattgacaggtaagtgactgtttctagacagcaacaacataaacaacaaaccgcttatgcccccgaactggtcttttcgactgttcttgtttgtccctacagctgtgacttacccgagagataatcctctgcagatcctagcaggcccagggtcgggcaaaacaagggtcctcacagctagggtagcttacctcgtacattactggggattgaagccatgggagatcaccgcggtgagctatcctagaacagtgcagttcaggcaagcacttcggctgacaggaatttgtgaaaccgttcataggtcacctttacgaacaaggcggcccaggagatgaggaagcggttgaacctgttgttgggacctggtactgcatcgaggctgattctgggtgagtagccccgaccggggcgagcgaggaatgttgttcacacatactgatctctccgtactctgaccgattcagggacattccatgctacatgcgcagggtacttgcgcaagcacgggcgtgtgatcggtctcccgaacaatttcgccatcatggacgccgaggatgcgtaggtattcctactactggccaaggtggaccaattgggctcatacctatttgccgctcattcgacagcaaaaaggtcatctctggcctgttgaagcccatggccgccgatctgaagtcccggtacatctcgttgaaagatggacaggtcatgagcgagatctcgaaagccaaggcgcaggaggaaacgccggaacgactccgagcgagagcgaaatcgttgggtacgaaaggagagatattgtccattattgcggatgtgagtcgggtgatggacgcccggaatccgtgatctgatgacctgacttgtgtcctcgatctctcgtgctcttcagatctaccaaaaatacgaagaggcattacgatccgccgattcgctcgatttcgacgaccttttggtctttggcctcaaactcttccgagccgcccctaagattctggaagattgcaagcatattctcgtggatgaattccaggataccaacactacccagtacgagctgatgaagctgttctgcaagtcgcacaattgcctcaccgtcgttggcgatccagatcagagcatctacggatggcgatcagccagtgagtgcatcaattccgtttaagacttgaggacatgcggctgattcctgaccttgattagacatcgagaacctggaccacatgagacgaggtgagccgatgtctggttcctccgctgtgactagggcactgatgccctgcgcggtcgtgctgacgatacagactttccaagcacggacgcagtccatctcgaggaaaattatcgatccaccggggccatcctcgcagcctctttggccgtcgtccaacaaggtttgtctcgcggtcgacttccccatcgcggtggtgcaattgctgaccaccacggtcctttttccagacaagaaacgcaccaacaagggcttgtttacttcgcatggatccggataccctgtcacgctcaagaatctgccttccgctttcgtggaagccgcttacattgccgaggagatcaagagattaatagcgcactctggcaacatgctcggccacgacgattttgccatcttacgtaagttggtgctgaacaggcatcagtacgaggtctgacttggcttgattcgacttagtccgttacaacgcattgtcgagaccgatcgaaagggcgcttcaattggagcaaatcccctcgaggcttattggtggacacaagttcttcgagcgattagaagtcaaggacctcttggcttatctgcagttggtggacaatccaaattactatgtaagactttccagggtgcagtcgaggccaattgaacgcgattaacgattcctctgtatagcctgcattcgctcgtgttgtcaatgttcccaaacgtgcgatcggagacaaggtcagtctctctcttacctgagtcacacgatcgccctctcatgaattgctcttacgcgaatgtcatgaaatccgcagtccgtcgaggatatccaagaacaagcacgaaagcaggggatcaccagtatggagctgtgcgaacggattgtggatggcgaggctattgctggagtcaaaaccggcctcaagaagaacctcgtccccttcgtcaaagccgtgcgagaattgcgggtccacgctaaaaaggtacaaactcgacaatccggggcttgacaatttggtgaatgactgatttcatcgagtcttcttacaggggaccgatgttgctgaattgataaagctcctaatcgagaagattgggtacgaggagcatttgcgcaagacacaggcagacttcgactccagatgggagaacgtgcaggagctggtgagtccgagacagcatctgtggttcccagtgaaagagctcgaacatcattggtccggcagatctcgtatgcggtcatcgtggcgacggagcaatccagtgcgctgcaattaccggatgtcgaattggaaggcttcgtctctgccaagtccatcgttatcgaagacgaagaggaagatgtgaagccggtcctgcatcccatcttccagcggtcggtcagctcctctagcaacgaagctacacctgcagctccgacactaggcatatcgaaatctatcagatcgaccaacatcaaacgagatgagactatcgaagtcgcagatcctggtttggagcttgagtacgacgaggaggacgaggactttgtcctcctcgatagcatcgacaaattgccgacaaccgaggcaatttccggtggtattgatgtcaggtatgcgcgttgctatgtcatgtcagtgtcatacatgattggagaatgctgagggcattgctggattgctagacatactccgctgcgagtctttcttgaagcgtcgatgttgtccactgatactgagagcaaggacgagtccaataatacacctgtatgtcagtttaccagccccacgaagcctaggctaataaccacttgtctctgaactacgctacagaaagtcacaatctcgactgtccacggtgcaaaaggcctagaatggccggtcgtcttcttgccctgttgtaagcttcatgagaccggtccgccaggtcaaccgtgctgataacgcgttttttcagtggaggacgggacatacccgttctaccgcagtacggaagaggacgaagtacgagaagaaaggtgagtctcggctggagcgcacgtcgctgcgatgtagactgagagctgggatctactgctgctccagacgattgctctacgttgccatgacccgggcccaggccgctcttgtgagctgcgctatttcgttttgctgttgctcatcgaatctgataacgtctgttctgctgacaggttttgacccatgccggaagccgaatgctcggtggacaagaacaggacaggaccctgagtcctttcatcgtcgacgctcagaaggcatcccccgtgagctatgcttcccgatgcttgcagacgaccgcgaactgacctgttttctacccaggtcatgttcgtttccagcgcgcctgacgtgtccgagaaggacagggatctgtttgctgcgctgctaaaccgtcctccggtatcagcagccgactctagaaaggctgtccaagcatagtaggtacaatctgctgggatcgccaaggatggttcttgactgccggtccttctaaacaacagtcgagctacggccaagcccctacctcatcacgtcaaagggagtcgtggaggaacggaccagatgttctggtttaactctcacaaaaaggagagcagagcaacggaatactggtcatccgaaaaggacgagtatgccttgccgcccatgcaaggtgatgctgcacgaaaggccctggcggtacccacagaggaacgattcgagccacaaggaactggattcacatcggctcgaagccgtttgcttgacaaggtagccgagaggctcggagacaatccacgcttttcggcacctacgcccagcactgacaaaccacagagccatcgaagctcgtctgcagtcggtacttcgctcagggctagaatggaatacgacgaaaacatcagcctcgacttcggccaggggggcgatatgacagcggccggagcgagttcaaagaccgactttgcgaaggcgaacaatcagtcaatcaacgcgatgaagaacatcggtctaccaccaccaatcacgactctttggaaagaagaaccctccggaaaaccttctgttggtgtgaacaactttcagagcgcttcttcaagctctcttgctatgatgaagaatttagggatgccagaagccagctctagcgcggatccggttcgaaagcctggtagtggcaataagaggctcggcattggtcggccgatggcggcatggggaacgaagaagcctcgtaacgactaagtgtgggtagagctagcacgaaacaagaacgactcttaacgaatataacgatgtcaaacgctgtatcagattgcgactgtatcacaatgctatgcaatggtcggtcttgcttcagttacaccaagatgcatcaaccgacaaggtcaagacgggtgtgttggcacgaggtcgaggcaagggagtcggcatcgagggtgcctttcagcccctgttccatgaccgagaatgtgatcgaatcaggagaagccgtctcaagggtgtgatgccagtgtcggcccgaagggcaggatgcatcgagtctttctatgttaatgcaatcattatagtacatgcgtccttctgcatctaggcactcaaagtcttgatcgcgtcatccgcctcggactcgctcagaccgacattatctaggcctccctcggatgcccgccaattcttgatgacctcgaccagggcggcttggttctccccgttcaggccgtcgttcttggcagcgctcatcagggccgcaaacgacttttcctgaagatcccagtcaggctcctgatctccatccgcaccgaccggcaaggggttcgtaagggaagacaccaagccgtccaagatcccgttctccctcatggcctgtaacatccgtttcatcccgtcctcgccaacctgggtctctccagactgattgatcaacgcgttcagcaggaaagcgatctttctcctgatcgtcatctccggatcccgaagtccttctcggaggacagcccagcctcgagcgctatcgcttgacaagaggtcgacggcgccgggccagttcttgagcgaagacgacaggcagtaaacggccttggctcgggtttgaggcgagatcttgacgctcgaggtggtcggatgtacggaagagatcagagagaagagctttggcagagggtccttttggaggaactggcaagttgcaaagggacagtcagcctggtcgtcctcgagtgtgtctcatcgtgggctaagaataactcaccgctgtctgagcggtcaggttgttttggatagcagtcccgctgatccagcatgcatggcaaatgacgggatcttgcgaggattcaagtagggacatgattttgggccacatttgcatgttttcgatgttgttggcgttgtcgatcatctccacgagctgtcaaggcgcggtggtaaggtttaggtcagccaatcgttcggttcgatcgatgccaatcgcatccgggtgtacacacgcaccatctcaaagtcgtccagtgcgaacactcgctcgttcacatcctgactctcgtcgagagcgatgttgagcttttcccgcatcacaacggcatcgctctttcccataatgtgatccagcatgtctgacgtcaaatccgacctcggcttgggcgtaggtgcgggtccagccgtcgaaggggcgagctggacctcgggtccatgaccggaagattcgctatctgatgggtgtagagctgctcgtggtgctgatggccgattcgaggtatccgtgttggcgatagaccaggtgaggagggactgcaaagggtcggccattttgagatgtttcggtggctggcagttctagcttatgaggtgtgcgggtcgataacagggtcaagcagtgtaacgattctgtttagaagctttcgtgcagatttcaagaaatgtggcgatagtaagatgacctgatcgagatggtgtcgatctttacgatgtcaatctgtaatctacccttctgacaacattttgcgtgaatgttcgagcaaatcccgagtcgggaaattgaccgaggccgcgtttgaaatcgcgtaatatgatgacgtaaacatgtaggaaatcacgtgatgtggcttgcgacaaggacaactctatatctctagcgagctgattgccttttaaggattggtcaacttaaaagtcgtattgaattgtacttgtcttgaacttcagctcagatctgaaagctttccctggctcgtcaatgtatgtgaatgactcgacttttttgttgcgttcccatgcctgtttgtcccgtcgtgttccaaacagagcttggagtatcggtcgctgttcatcactcggtgtccacttcacgtcgttcaacgtcactttgaacctgttgttacagacgaatgcccgacctgcaaggttctccgttttcatttcgaacagctccgcaaggactggagcgccccagccgagagcttcgtcaaacgcatctctcgatgctaatgatgagaatgattcagttggttatcaaggcaaccacacggaagatcggatcggcactcacctacgtgatgcagcagatatcgctgctccgtattttggttttctgtaagctcttcctcgaccgaaccggtagccgcgatactagccatggatccggccaggattgaagacgggattggtggcgtgtcttcaggaaagcgcgccgatgcatctgacgcatcattctcacaatcggctgtagaatgtgtcggatgcggaagtgagaattcctcggccgacatcctgagcgtattccgatcgataggggagagcgccggactggctcgatgtgcaggaagggaatcgtttgatcgtgtgtcggcgtccgactcggagaggcttcggatgccgcctgacagcgatttggagaccgatctctcgctgcaataccacatgttttgttctggataggaaaaggttcagagtcctttcgaatttactagcctctagcgtccagatagccgtgaatgcctgatgcgcgtatatatatactcacatatgcacgtgtgacggcaacatgtagggatcggcccagtctaattgtttgcaaatgctcatgtcaaatacaatgtcagtcgctgtgtgtggtccgtcaagtgagaacaattatgtgcaagacaatcacgcacaacaaaggaacacacaaagtactctatcaagtcttgcgtcaccagatcccctacaaccgatgacgaattgagcttcgtaatgcacgtcgattctacgtcacgtggaaggcagttccgctgggccttggaaatcgatcagagcatggtcttggattgtgtcttatggtctgcaaagtctcatccgatcgggtaggtcccgatgagttttgcagaaggagtcaagaaggcagggattcttgattcggggtcgcgtaaattgactagcgcttacgtttcatcgacagccggacatgggcgatggtatgatttattgtttattactctacgggaaacgatcaactttacagaagtatgaagcttatgtataccttccaggctctttcggatcgacaaagaccaatttcgagacaccttgccctgctatcgcggaccccgaggataacttgaccggcgtgtaattacctcatgcgtcacgccgccattacctctcaaaagcgctctcacggtctcctgttgctcctgattgactctcctactcagggtcccgatcatcctgatctcaaaattctgagtgccacgaatgaactgtgtttgtccgaattcgaaccttttaccgtggacttctctcagtccaaactttactctgagaattggaacatatttctcacctgcttccccaagaccctggctgaaccctgcgagaattgcaacatgcttcagctcgagctctacaaggaaagtgataatagtggcccttcaaccaatttgactggcggggaattctgaatagcctgaattctttgattcacaagtcgctccatagtgattcgactgttctgctcaagctcggtgttaccgacgtgccggagttagtgttcttttcggttgttgatgaagttactgtcccttggtgcagttctaactgggcagacttgataaacatcgtttttgctatgaacatctcgaccacatattatggttatcgactccaaacaaattttcccgttcagcagcaggaatatttatgactcagtcagatggaatgagcgaaaaggatgagaagaggtattttcgcattacttgagggaaagggatgcgttccacgacaagatagtaccactatcaaggaacgagatgaatactgcgatcccttaatccccagcacgcaagtacaggcgagcaaccgccgagatctgtgaactaaatgacgattttgacactgaagacgcaaatcggtgatcgatcgacacttcggatgagtatgataatcagggtacatgcttcatgaaagtccataatggtacaagagttgagcaggggcaacattcccatcttggtgtaacctgtagacgccgaacatatcaccagtaaacctcaaattcgcagacaaatcgcgggtcttgctggtctggctgatgaaaccgccatttgctgcattgaaccggtcggatacccttcgtcttgccaactcgacgggcgaaaccaatcgtggaacataacgctgagaaatttctaatagcttgaacctgatcggaattcgtcgttgacgcagatttcacctcgatctgaccatccggatctatagactgatgctcatgagtgtacatcactgattccggtgcaagagcaaggaacacgaaagcgaactgatgccgagtattgattgggtgaggttcgatgtctctccaaagttcatcaagaaagaggcgtaatgcattctcgccttgaactctggcgacagccaccatttgagccgcatcagtcgtatctgatgggtctgcgaagctatttgtccgtttttcgatttcgacaagctcctctatgtcccggggatccccatctcgaacgagatttgcgaaaaatcgtccggggtccgatctgcttgatgctgtaccagcgcgactagatagattgctctgatcgtaagatcgagtggctgcggagacgccactgttggtgcttccggtcgatgtcattttgcttaacaagagtcttcttggtgcagatgagcagattgatgagcttcagcccctaaaacatcaggtggcgagatcatcggcaagtcaatcttcgggactggagattaggacagcttgtcttttttatcgctttcagcctcgcgcgaccaagaaccgaggaaggtaggaaatgaatggaaaggtatttctagcgataagcctcatgactatcacgccaagactggtatagtcagagtccaggctcagctgtcaccccgaccggtagatcttgcaggggcggaggctccgagaataattagatatcgcagtactagtactagggttataaagcgcagcggtgtctgggagatggtgattatgttgagaaattgtctgcccggatcgtgctgcttcaagttcaatctgtcgcaataggcacatatctagactcagccttgccgaaatgatttataatttccctagcaagatcaattttaccggtttacatctgtaagaattgggaaacatttgcagaaccaacgcttgcattcgacactgaaaataggtcaattgagctgttgacacgaattcgcttcacttcgatgggctgcgttggggtattgtgaaaagtaaccttgtataagtgtcctaagaattccgagtccgggtcgaggagcctacggtggtaaagtgtgcggatagttggccaggtcgattggtacaagaccgctccatcctggggagctagaacctcccaagcgtcgtttggaggatgtaccatctgaaaggtcttagcaagctcaagatattcatagccagcaaggtctgtgacctttctttggtgaaagtaaacggtgtcggcggtgtcgggaaaacgcgacgagactatcgagtaaaaagcctttccccagccggaagcgaacttgttgactacggagaaagagcttagctcagatcgttgagagcagatatgcatatgacgaacggtaaggtccccaacggcgcaagacaactccatccaatttctcaaatgttcttacagattgctcgctgcctaaatgaagttcgtccagagatcgggactcttccgagctgaagtaaacccccaattcatcctgtatgctttgagaaagatcccagcccactgtaggatcgaaagcagatgccgcgaagtctgctgccattgacgggtcaaattcgcctgccgacatgttcgctgtcattggaaggaaaagtctgcatttacaacgactcttcgagcgagtcgccacatccgaagctgtggcgatgaccaattgaagcgtatttatataagcgatggtcgcaaaaaactgtgctagcacgtcagcgatagatgtctcgctggacacaaaggatcggtagatcgcgttatccgaggctgaacaggcgaaactgtcattgcgagtatctttcagccgcttcacatcacacttgattgcgttactcttggctgccgagcctggtatgttgcgcgagaggtcaaaggaagccccatgccgagggccgcacgtagcaacgtggggtcagtgcggctactgtggttctctccggactaaataaatgcgaatgatctaagcgagatcggtggcatcctcatattttcgggcatcgtaatcccgttgcgtatacctatttcgaggggggcatcattgacccgatatcactgctcgtggacctggtagtccggtgtaggaacgatacagtatacgtgccacagagtaaaataaacattgtgccgcaggaagtagtaaactcagccatgtagattactgtcaccagctggcgatatgatgttttagctgttccaaatttgcgtaaaggaatatcactgacaacccgaaaatcttcagaggtcgtcaggcgcaggttcgactggctaccaaataagatttccggttggacggcgtgccaggcccttaaaatccacgacgtctcgaaactcggaaaatcatgttttccgatgggtggttttgcaagggcgttcgacatcagcttgtctagtggtcgtcgagcgagcggcatcatcagaaatacatcgcttctctatatgtacgcttgcaagatgaatctacgagaagatgtgattggctaaaaaaactagacgtgtaggaggaattcgcagacgaaagatcggtcctccaatttaaaccgccatatactgcaacggtagtctcgttgcttccatggaatgtggtcccatggactgtgcaaccatggagcgtacacgatgtgcccctcgccaatgaggggactacactttcgcagactttcgtatatctcagcctggataggttcgagtgctttgggctctgtagtctcaaacgggcctgactcgacgaaagatcgtcgcccgcgcgtatagaagatgtgtcctggtgactcgactgagaacgcaaatgaaaatcgatattgcatcgccaccagagatggtgccagatctgactggaacgccgccaggaacgtgtatagaagcagtccactttcgctccaagcgagtactatcgactggtagatgctgcttggctcgtttggatcttcagtgctcgtttgagcatgcaagccgaggacgccacgtagagtttggatatcactctcactagcgcggagaagcacatctttggtggtcagcgctgcacctatccaactaggcatagacggttgagtggagatggtagtgttcacaccggtgtcagcaccggtgtagccagaagggtcgggcgcgttcatactgctggcgattcagttttgatggaaggtactttccagagaggacagggaacacgattgcattttggcattgacgcctctgaaagtcgattcccgtcttaaagctgtattcttgtggcaacgttgtcaggtgatgttctataacatgaaaggagtgatttatggcgttcactctcagaagatcacgtccgcccgcctcgcgcgacagtctttgcctgacggccggatctgaacagagcctgctgatgcttgcccacgctgtcgctctcgggcatcattactcgataacactattcttctcgggcatagagctctcagtcacactctggatcgctaactctcatctcagttgttccaagaaaacatgtatagatctcatcatccaacaaatcgggcgaatctttctaattggatacatttattgacgattaaaagcgacgaagaaggttgcaaaacaggaaagacgcggtgatgatgagaacagaggacgcctctttttgattgtcctgcgtatggtcgacgtgtatatgtatattcaagaaggggggtgggcaagaaagtgtgttgtgttgtgtttgtcgttcgatgtcgtcgtcgatatgacggtgaagcgtaatcacaggctagggggaagtcaaatcgatcggaccagggacaacggacgagaacgtctcatcgtccgcttcgacgatacgaatctagtacctgggtccggtcgacatggggttctcggggaggggcaacccagcggcggggggaacgacgattccaccgacccgtccgatgcttccggccgaggtggtctgcatgccctcgaaaccggctccgacacctccagcggccgaggtcgaggtgaacgggttgctatcgtgagcggccgaggcgtgggtgttgacgccggtagagtaaccaaccgagttgtcgttgttcaaagccgaggtggtgccgaatcggttggacgaagcgccgaactgggacgaggtcgaggtcgaggtggcgggcgagttggcgttgatctccctggccttggccttgccctgctggaacaagggcctgagggcagagtagtagaccctctcggcacctcgggtctggggcaacatcaaccagacggtaaaggccaacttgatggtaaagtagtgagggatgtagtagaggacgaccctgagcgcggcggattcgatgtagttgaggaaaccaaacacgatccagtaacacagccattgggcgtcgtcacccttttgaggggattcgagcgcgtggcaagtgaggtaggcggggagggcccaaccgatgaggttggtgatgggctgggcgagtccaaagaggttgaggaggatcaagagggacatgctgcgtggtgaacgggaatcatgggtcagaacgacggcatgacggggcatgaagtggacggatcgagactcacgtgatggagaatccgaggacaccgtaagtcttggggatcttggtcctggcctcgaactcgttgaggaacccgaacctggcgagctgtcgagcacggtgaccgatcgttctcaaatcagcctccccgcttagtcttacgacgacgaccggcgactcacctgctggtcgagaacgttcaactgctgttgagtggtctcctgagcgctctggacaagagggtgctgtgcggcctgttcaccgagagcgtgcaacctctcgttggcctgcccagcagcctggtttaacttttgtccggcctggttcaacttggctccggcctgctcctgcgcccgcttggcctggtcctgagcgttcctcgcagtctcctgagcggaagccgagagctgttgacccttctgttgagcctgctgggcggtgttgttggcggcgactttggcgtcctggccgatggcctgggtgtgagccttggcgtcgtcgacggcgacggcacggggagcgtcagagacgggctcgccgacgcctcgctgatgggagaggacggcgggttcaccgacggtggtctggtggaagtcggacatgatgttgagagagagagagagacagagagagagagagagagtcgagaggggtcgtcgagtggtgatgtgtcgagaagagtttttgactagttcggggtcaaaggctgtagagggtcaggaggtggaaggaggagggaggtaggttgttcttatatgaatgggtagcgagttgacgagcgatgatgatgatgatgatgatgcaagtgaaggtggtgacggtgacgatggatgatgatgctcggtcgtgtgctcgcagcgtcatggcgtcatgggaatctttggaactcaccaccaaagtccttcatcccccgctccccttgccccgccagcccatggcaggatccaccacgcacgcaaaccgcttcacacacaaaggatcaaccagcagccagcagcgagccacaccagagagattcctcgtcgccaaaagaaacgaagaaaggaaaactcggtgatgtcatgatgacgtagactacaagcatctggcgagaaaggttcgcgagcagggggagcgcttgagataaaaaaagagagatgatccgtaacatgatgatgacgcgcgcttctttgcaagcaagtgtaccggccggggggagatgtctcgcaatcctcctaacgtcatctcccccgggccgtgattgtttcaagtgcatcttgtcatggcgactggcggctggtacgtttcgcccactggccactggccgtcctggccaaacagcacatcataaatacgcaggcggtgataccttcggatcattctgtggagaaacacagcatacctacctcctcgtcgtcgtcacgagtctgtctttcgcgaagcagattgcatcaagtctgccccgcgttcgaggtcgcttcgccgggcagggtggcagcacgcgcgcgcgcgacgacttgacaataaaaggcaacggttatcttttaatgtcttttaatatcttttaaatcaaacatacgcgactccccgtctccctcacgtgatgcctcctctcgccttgagccaccctcccgtgctctctggcgaaacgcgctcgacgcgtcactagggctaacccaggctcggctcattcaaataggccaacactcgagaacactcccccccgactctcattccaaccttcatctaatcctttactcgttcacacaaaacttcatcccgtcttcaccaaacctaccactcactacccaaaccacccccaccaccaccaactcttcatcgaaatggcccccaagtccgctcaagcttccaaggtcagtcacggtcacggtctcgcgctcgaccgtcgtcgtcaaccaactaacccgtgtttttccacaaacatgcaggctccccagtcttcgggtactgcctccaaggcccctgctgcttccaaggctcccgccaaggccgccaagactgccgctcccaaggccgagggtggtgacaagaagaagaagaagtccaagagggtcagtctgcggtcgaacgatggttgtgtcgttccaatggcggtcgtgctgatgatcagttttgacgtcgacttttagaccgagtcttactcttcgtacatctacaaggtgttgaagcaggttcaccccgacactggtatctcgaacaaggccatgagtgcgtaccctcgacgtgtccctctacccgagaatctcgactgacctcgacctctcgaccctccaggcatcttgaactcgttcgtcgccgacattttcgagcgaatcgccaccgaagcctccaagctcgccgtctacaacaaccgatcgaccatctcgtcccgagagatccagacggccgtccgattgatcctccccggtgaattgtccaagcacgccatctccgagggaaccaagtcggtcaccaagttctcttccgccggaaagtaaacggcaggaacgacgatcgtctctccctcttaccaccaccacccctccgccgatccccgttggactggccatccgacgttcacacatccccatccagcctttgcttttcgctcaagggataccgcacggagcacgaacaaactcgagcgtgaccttccgggtagacccgaccaacctttttatttatatcgattcctttttcccatcattcgattgtggatccctggtccttttgtagtagtgtctatggacgtgtatgatgccggtgatgatgatgacgatatgatcatattcatcttgacgatctgatctggtctcttcgcattacgtttacgcgcaactgccaatgaccaatgactcgagtttaacgagcgacgatcagaccaccaggcgagggatgcaatggtacgacgtccgacttggtagtacatggtcgggggagtagcagtgtagttgcgtcgatcgacgtgcaagtgtgaacacaatcatcgtctttgtcgcagccccgtctcgttcctcgttattgtccatcggaacggctcttgatcgtacaccaaagcaagtacaaatcatagtactactagtatacgcctcgctcggaacaggcggtaggacgacgtacgaggtggatggcacctgcaggccgaggacttgaagggacattgtcgtgttacactctattcactaggggctggcatacggggctaggtcgggtcgggtcaggcgttcgctcatgtccgaatcgtgatgatgtttgatctgtggtcgggctcgcggtcgagatatttcataccaccaccaccatcttcatcatcaccaccaccactaatatactaccacggccactgcatcacacgctgtacaggtgaatcaagtggtcgagacgaacgacgttccctgtctttcgagggaatcaggagctcggtctagatatcagcgagctcggcgagagagggtgagcttagacgcaagctaaaggggcgttgagcaggctagggtggggtactgatgattgatggttacgggtgtggggtgttcccaaaagcatataccaggcaacacctcacttacactggtggtcgcagcctcgtcagcgcttatagtagagtgagtacgaatggacgtcggtttgcacatgaaggtccggtcgacctgacaactccgtcaactgctgtagacccacgacgaggactcgcacggccacggactcagtgataacgcacacgcccgccgacgatgcaaaccccagtgacaacgggtcgacagtccacgttcaagcggaacgcccatctcgcctactttcgacgatgcttgcaggccatgccgagcaaggcgaccgagggggacgggaatcggatgaccctggcctacttttgcgtcggggggttggatctcctcgggtactttgacgtcgacgaggtcgatgacgaaaagcgcaagacgaggaaaagctggatcgaatgggtctgggcgatgcaggatcgttagtgcgaacgtggggacgcttttcgtttcctctcgatgagctgacccgacgggctgacattggtctagcagctacgggaggtttccgaggatcttcctacatgaacacgcctcgagcgggatcatccaacccggctcatctgccttcgacatacacggccatcctgatcttggccatcttgcgagcagacctgagcaggctgaaccgaagagggttgtgggagtttgtcaacagttgtcaggagccagacgggtcgtgagtcgccgtcattcatcacgggaccaccgcgcgtccgacctaatcctctcgacatgcttgcaggtatgcaacgttgcctcttcgggtcacgccggatcgacctaaaccctcattcgagtctgacgcccggatggtctactgcgcatcggtcattcgggactggatcaggttgtccggtctcgagctttctaaagaggaacgacaggcggatcttgacgctgcggacttgacaaggggatggatatcggcgtgtcaggtgagcacgcttgcgcgctggccgttcaacgctttgccaacagacttgtcccgatagacatgggaaggtggattcggaggtcgtccgggtttggaagcgcagggtgagtcgccagctccatcacaagaaggtcgacgctccagactgatgcagtggctgttgtgaaggcggcacgacatattgctgcatcacggcggcatcactgatcggctcgacgctgagcgacacgacatctgccggtcgctggctagctcaacgacaagtgactgatggacgaggcggattccaaggcaggcctggaaaggacgaagacgtgtgctatagcttttggtgcggggcggcgagcagggtgagcatcgattgcgacctttgcggaggaatcagagctaaggagcaagtctacccgcaggtcctttcatcacaagcaatgttcgacatatcgagcaactcgcaagctctgctcggcgcacagtcacctataggcggatttggcaaggcgagcggcgagtttccaggcaagtaggaagatcttgctcgagtgttttcacgaatcatctaattgacaagaactcttcgaccaatcgcctcagacccgttccattcatatctggcgctggcggccttggcaatgaacgaggagaccctcgcaatggatgatggtcaggacccattgcagctgggcctacaacctctggatccggtatggaatgtgacgaggcggacgcgaatctacttggagggagcgttagcgtctctatagccacggggttcgctggagcggtctcacgcacgagaacctgcctggtgaggccccagggcttggcgcgacagatcatgctctgagagtcctcgccactgccatagagtgggacatcatgtctttctatcaacggcagagggagtaagccttgaattcgttgaaacgtaaacaaccttgctcagttcggctcagcgacgtcatgaaaactcgcatgcccatctttgtctgcccgcgagtgactcagaccaggtccacaacggtccggcaaggagaggaagcgtcagcggctttgggtcgactccgcctcgatctgcctctgatcggggtcccggaaagatagcctaagccaagccaagcgacaggtcgatttggttcagacgctattcgcaaaagggtttggccgaggggcatcgaacgctgctttcgaacaggaggagcttggcgttcaggcagagtgagaaatgcctcaattcggcctcatttccttgtttggatccgatatcaagtgtctctttggcatacgattctacctagccggggtatcaaccattagcttgagacccttaaatatgtgttcaggttccggaaagcaatggcgcatgtgccttcattgaaggcagctcgtcatcagtacaaggtgactcgaaatatcaaaaatgaaggcttctaactatgcgattgaacgcattctcaacccgtatgaaaacaatgtgacatgctatcccctatggttcgccacagtcgtccatggatgggactcagctttgagagcgaccaaacctcgacccgtccgcccaggattggcatcgagcctcgaggtctcacttgaggtgccgcccattcggatcgcaaggttggacggtcactaccagctgtgatcaatctgcaacgcagaaaacgagaagaactattcaagtgagttgtggttggcaaagataatcttgcgtgctgcatggaatgcaaccccaggcaacgtcgtaccgcgacaacatccctgtcagtcatcgtccaatgcagctcccaagagcttgtaccaatcctcatcctgtcgctcttcacacttgatcctagactcatgaatctgttcaggaatcaagtgtctgtggtaggcttccatgacaaaggctagccgcatgtgtccctttgcaatcatagctaagatgtccatgaaataaaagacactcaaagcttgttggaaataggagtcatggctagtctctcacatgtggttgaggaaggaagaatattttggaaggaagaatgtttcgtcagttttcgaacggaacggatatcaagttctgcaacaagcttactcttgaaccaagattagctagtccaggaaaacatcggagtcgtcaaatccaagatcctctagatattctgactggcaagatctgagtctacggcttgaacggtgtcgatctcgaatccaaagatgatctagaaagttgtactctcagaagtttcgtcaattccaggcatcagatcatcaagtcaccatgacggaaatacagtttcccatagggttcgctttctaaggaacaggataatggcattgcatttaatctgagagacggagctggtcatgtccgtcttacatagtctaagcagaccttgcagatgggcagaaacgaggactcacatgcagaacgaagatgtcgtcgaggctggcaaaaccaacggctagaaacttgaagacctgacgacctgtcttacctgtcactactctatggctaggcctggatcgctgtttgccactaaaccatactcccacaaattctgcgatgggggggacatcgaggtgagtatctgcatacaccataaaacacggtcgtttccccttgcgagatcgattcgccggatgggaaggatgcgcttagcgccgagccaaaacgacgggcgtcaggacgcaacttggtatgatgtatgcatttcgtaattgaggagacagagatgggggaacatgagactagtactgatacagacatggacacgagctcgcggatcgaattcgtctacttcttggccctggtggccataaagactccgatgatgacgactccgaggaaacccagactggcgggcaagacgaggtctcgagggattcccatcacgtcgtccttgggatgaacgtgaaccttttcgctctgaccaaacgtgggcaccttggcgggatccgccgtcttgtcctcgagcgcctttacctcgggctcgtcctcttcttcctcctccttggtcgactctttcagggtttcgagcgcccgcgggttcgagctcgtttccatatccttggcagcctcctcccacgccttgcctcccgaaatggtgagcacgactcgatccgacttttgcattcgagccgtcttgaccgcgtcggtgacgtcgctatcctgggtcatccaaatgcgatcaccatcgtcgtcggtgtaggacatgttgaacttgcccggatcggccttgggaacctcgaggctcaattcatccactggagggaaaaagggatcggtcgacagtttgccaaagacgatctctcgaaggttttcgtaattgtcatgtcgagcctggaatcgatgcgtcctcccgctaggggtcttgaacttgaaaatgtacgtcccgtcgtctaccggagcggcgggggcggcgaccgacgaggctgcctgggcttgtttacccatctcggacccttcgtcatcgacagccgaagccgaatcgcccggttgaagctcggaaaagggggtcccgacccgttcggcgcgctgcatgtgacggggcacgttgggcgtttgaggttgatccggaatgtgacttccagagatcatcgatgccgtgtcatcgtcgggaccaccggcttgaccgagatcctcgaagaatttgctccacatgggacccccgtcagtgttggtcttgtcgtccgacatggattcgatctaggttcgagaggcaaaatgcggcgtcagccgcgttgactttgtggccgatcgacaaggaccgaaacctcacctgctcgagcgtagcataagttagcttgaggacgtcgacgatcccgaccaacctcccatcagactcgacgacgggcaggttcaagtaatgtccatctgcaacgtcgccagtcagccaagaacgcacgcacgcactcttgcatcccgtcgacctttttttctaggcggggcttgcgtcactcactgtgcatcttgcgtagagcgtcctgcacgctcaaggtgggcaaggcggtatccggatgaggcgtcatgaccctgacgacgctacaccttcccggatccaatccggcggcgatgacacggaggacgacgtccttgctggtaaagatgcccgcaatcttggtccccggcgcaccggcgctacccccagccccggagacggtggacccgacggtcgaattggagctattgttgatcccgcctacgggaccctccatgacgcacacggcggtggtccggcgttctttcatgagacgggcagcctccttgacgctggtcctcgcgctgaccatgggcggggggatccgggtgttcatcaccgtggtcagatctgggagggccatcttgtccttgagcgcttcggcataggccatcatcgccgccgcttgaggattggtggacattccaccgagctcggtttgaacgccggcgagcgcggcggtcaattgggcagaggccgaggaggatcgttcgaccttggcgagcgcttcgtggaagaccttggtaatgtccaacaacccgacgacatcgccgtcttcgttacaaacgggctattgaccgacggtcggttaatgtcggcgcgatagtgaacccgagctcatatcccggccacgctcaccaaatgcctgaaatgcttctcgaccatcaattgcaacgcctgagtagcgctcgtcgtatcccgggtgaccatcgggttcggggtcatgatctgggagaccaacgtcgtcctcgggtcgagaccttccgcagtgacctgaatgacaagggtcgatcagtacgtcgttccccatcgagtttgagtttgagctcgcaggaacgtttcccgtagacttgccctgaaagccagatccttggcggtaaagatcccactcaacccttcttcctgatcgacgaccaagacgcagtcggtcctcttggcggcacacaactgactcgcatccgataccgtcatgttctcggggactgtcaacgctggagaaggtttcaaaccggccacggtacccttttgcgcttgtcgacgggaacgctgggcggggttcgggtgcgggttttggccgtagaaagaggagttctggttgttggattgagagagcgagctggcaggaggaccggggcgtttacgggagagctcggattcgatctttcgtcgaagggtctgtgtgaagggggattcataccgtcgagatggtgggagatcagtttcgggtcggtgcgatcgagaggacggatcggtgtggtcgtctcgagttctcgcggcgagctcgagtatcaggacatgggcgatcgaacgcacctcatctcgcttgctctgtttcctcctagtgtccgagctgagaggactgttggtactcataatgtcgccagaggtggtacgttgaggcgtgggcgattgttgatattgttgttgttgtgattgttgatgcaggtgtgattggctggtcgggatggggatcctggacattcgggctcgatcgacgggggggagtgaggacgagcaatgtctcgagtgcgaatgatgtgctggctgtgagatgaaagtggtatgatatcgttgttgatggcgatgatgatgatgacctggatgatagatgatgtgtggtcgatggctgagtgacgatgtgagtgggctggtggggaatgtttgtttgttgacattgtcaccgaggcaatgactattactattacgtatccgcggtgcaagcgacaataggaccggacccatcttgacaacatgaaacacggtcggccatataaagcaaatcaaaaaggcaaaggagtctctatcgtgacatatggcctcatgtatatccctagacaacagatcagatgggtatatatcatacacatagtagccccctatcgtgtccccaaactggaggcgcgacgctcgacgatcgatcacttgcaagaccccatcaacaacttttaccgagacaatgctcgaccaatctacccagcgatctgttatttccgaccaagtacccgatgacacgtcacgggaacagtcctcccgcctcggggcccccgcgccacctacgagtgggatggacccgagtacggctggcggtaccgcaaataatgcgagagttcgccttgtaatcaaaaaaggcccaggcgctgcgggttcgtttgcgacccaatgtaaaacctttgggcatctttacgaggaagactgggtagggtgacctttttctaccttcactgtcgtgactcgctaacctggcacttgtccaatgacgacaggccgaagtgttggaaaatcctgcaagtcacaactctcctccattctctccagtccctctcgtccggccccgtcaacttttgactgacatgaataggtatgaccccatgtgttatcggactggtcaagaggacgaagtagtgagttctgctgtccgcacggccggaccgtctgactgatctacgctatgtcaatgaaccgccaacctagaagggacccagtctagatttccacggttacatcctggaacgctgcctctactggtcgaaagaagatacgcccgaggaagagagccaacggttgctcaaagaaatcttcgcggttctactactccgaccaaaaatggctggacaaatggaaggagtgtctgcagatcgaggacaagaaacaatccggcgatgctctcgtcagccttttgaacgaggcgagcggcaaagtttccaattgagcccgaacggtcgtgttcctcgaagtgaccagcttctacccgcttcgactgcctatacagtcgagatgtgtcggtactttgaaaaagatcagatgtcatattgtattagaggccgcatttcacgtcatccaaaaggttcacaagtgactgcatacgttcgatgccgtacggggcatgcggagtcatcctaagcgggactagctcaatattgatctatgtccagatcagctaattctgccatttggctgcagttgacgttgcaaaagttcacgcgatactgcgggggtatcagttcctgaggggagtaaacgattgcgatgctcggcaagcccgcgtgaggtagttccgaccgtttcactctcaacttactgtacgcaagtagccgtaagtgaattgatgcaagccgtaggaatttcaaaggcgcagctccttgctatgaatggaaataggtgagatccgatatagttagcttgtccagtccttcacgttgggctgcttctcagatctagcgggtcccctgttaacagaggctagtataggttcatcgcgtagtagccagctgacctgtcatctgatgaaatcctttcatacgaacgaagaagcaacaaagccgaatttgattatagccgtcgtcatgatagtcggacgcatgggtttcgcgatacttatacctttgcattctccgtgaaaacatatccagttttgctctttttcgttgtgaaaaggacgggattacggaatcatcgagacctcttcatcaaagactcactcacgtacaagatggaagggagccacgacgattacgcccaaacggttcagtttctacgcgaatcttcttcggtctatcccagcgtggcgggagatgatatcgactttcacaattctgcttctgcgcttcatatctttgaagtgggaaagttctgggtacgtgctatagaatcagattacagtccgggccgaattgatcgtcgagtttcttcttatttccacaggaatctgcatctcgggacggagaggtgagttttctgcagacggggccgtcttttgtagtgaaggccaggctaatcgtgcactcgtgcaaacaggatcgagacataatggttggtgttatgcgatcaaagcgcgatgaaattcagcttgtctaacacgttcctcttctagacttcgatccttgaaatcgctgggcagatgtcgcagtcgctgggtgggaatggacttgaagaggcaagcgaggttatgacggaatccctggaagaaggcccggttagtttgatcgtacccatccttcagaaccttcagcaacatcagctgaagcgatcttgctatgaaggacatctttttgaccgagttgtcatcgatgcttgatggcttctcgatcagggatagcagactgagcgaacatcccgtaggccatagtatcgccacggaaatgaccctcaacaagaaaccatatgcgtggacctggcatcggcaggctcaaggggaaccggatctgcaaaaaaggatgctcctctacactcgaaccgtcaacagcagtttgcagcgatatatcaggaccagtacagggcaaaacttgcaagaaattacagagaagcggctttgtcacccagtgcccaatgaatgggaactgagacatctaggagccttctttgggatcccgaaacgccgggcttgttggatcgagtgcaggtctgatgcggaccgccagcgagaaatgcttgcggtcgtacgcatcagtcgcgagcattggaacagacttctaccggaacacgaacggatcgagctcaagttcgagcttgaaatcagcaaggtggatgatgttgatggagccgaggcgattttcttggaaggagggttcgaaggatggcgaaaccaggttagaattgaaggagtctgacgataaaacaggcatcgaacaggatattccgatcgtcgataagtgaccagaccgttgccggaacactccatgacccgaatggcagccatgcatgtaagatatagccaagatccatcgattgaaacgatcgcgccgtaatggcatcgcgacgtgatggctctttctggaggactaaaatcgaaaccgttgcgtccagttgagactctccacgagggaaatcgatccagacgttgcgcatctgcaagtctatgaaattggtgtacgagaaagatgtaacgcaaattaacattcccatgacagctggatctggcaaacgttgccgttagtgagtcgagtcgcgcgagttgtcacgctcaccgcgacattttttcgacatttctccagcatacggagtcgttggagtgcctggtcgcgaggtcgggagcaagtgtgttcaaacacacgacaagagacaacagggtcaaggcaacagcgacagccaagaattgtcaaacggtgtgaacctggaggtccgacaactcggccgagtcggatgagtcttcgggaccaaaccccggccgagaatatcatcacgtgatttgtcaacaccttcccctcgcgccctcgcccccttctcgctcggtcaacgccgatcacatcggcccgagcaccacaaaccatagaccgggagggtcaacgaggtgcaattttttatccatgacattccgtactcgacaactcttgctctttaccccgttgacctcgaacttttaagagttgctacacataccctgtgttgattgttagaattgcgttcgaggcatcttacgggaggcacgggcgatattcccaaaaggagaaaacgcgaaaatacggacgatttttcgcccgcgacctcgccggaattctttgccgaccaggaaacaggaatcgtaatcgacttcttgcgatccataccaaagagaagattgatacttcgggatcgagaggagctatcagaggcggtcaggacttcagcataaacacagacagaatatcgcatatccctagaaacgtggacacatcaacctcggacctatacgagcgaaaaacgactagcgagagacatcaagaggaatgtccagttcggagaagagcgcgtcgagggaatccaccctgaacccgtcccattccgatctcactactcgtcgagtcacgcccatcgcatatcactctacagagacgatctcgatgacccattcggatgctgagaggactgtcaggggggttagcatagacggcgagggcgatggcgacgcggatatcgagagagcaggagcgcgggtgggagagaagaaggagacggagaaggacgggtctttgacgctggatccgaacgaatgcaggttcgagggggaagacgacgtggatgatcctttgaatataccgttttggaagaaatggttggccgtcatcacggtcggaacaggtgccatttgcgtgtgagtatcaggggcttgcatcgggttacctgcgattacccctattgccacagccggatccctttctgaccatatcgcgtcgctttgcatcttcgctcttcttgacgatcaggacatgcacctcgtcgatggcttcctcgacctacgccggtatcgagaatgaattcgggatcagccaacaagtcgccatcctctccgtcagcctctttgtgctcggcctgggatccggtccgctcttactcggacctgtcagcgaattcgtagggaggagaaaggtctacctggctagttatacgatcttcttgttgttcaatatcccggtcgcgttggccaacaatatcggtaggtccccaacggtcgtcaaaatatagaatgaaaccgggatggctgatttgccaccgctacgatcgacggtgataaactcgcagccgtccatctgatctttaggttcatcaccggattcgcaggtagcgctttcctctccatctccgggggtaccgtcagcgacatgtttatcaacgccgaagtcggacctccgatggcgttcatcgcgttctgtccgtttggaggacccgtgctcggtcccttgatcgcggggttcatcaaccagaacacgtactggagatggacgtactacttggtcctcatctggtctggagtggaattggcgttggtcttcttcttcgtgccagagtcttatcggccgcaagtgttgaggctcaaggccaagaggtgagcggaaacatcaggcacgtttgcatggtcgagagactgatggaagggtcgagttcgacttggacagagaacgtaaagcgaagaacaatccggatatctacgctccgattgagaagagcaacaagagtttcctccaggccgtcgcgatcagctgcaagacaccgtttagtgcgcagccgtagtacctatctcgagttcctgcgctcgaactgacaagccggcttgtgatcaacagagatcatggcgaccgagatgatggccctactgttgagcttgtggacggctctcctgctcggcatcctttacttgttcttcaacgccatcccgctcgtctttcgagggaatcacgggttgtgagtcgacgatcggccttgtgaacgttcaatatggcttctggagcgctgattggagacgtctcgcgttacagctcgttgcagcagagcggattggcgttcttgggaatcgggttgggtcaggtgattgctgcatcttcgacaccgttttggagcaggtacgccggatagtctgcacgagccatcgaccgttcgagactgacgcggaaacgctcgccctcattcagagtgtatcaacgcgaatccgctaaacacggcggtaaagctccacccgaagctagactcttgatggggatggcaggggcgctggtcaccccgatcggaatgttcatctttacgttcacgacgtacgaatcggtaccctggatcattcccatcctgggcaccgtctttttcgggatggggatcgtatgggtgtttacgagcgtctttacatatctcgtagagtgagtcaagggcgcttcagtagtgattccgaggtgaaagatcgaaggactgacatggcatgctgtctcttcgacgtagcgcctatcgacccgtatccgccagcgccatggcgtgcaactcggccctccggtcgtcgttcgctgcggggttcccgctcttctcgaaccagatgtatcgaagattgggcactgtcggagcgtccggattgctcgcagggttgacggtggtcatgatcccgctaccgttcgtcttctaccggatcggtgcgagggtacggagcaagagcaagtttgggagcgcttagacgcaggccgagggcattcggtaccgaggcaactactggtcggcatcagaattataatggaggacaccctatacaggatagaattttcaccggcataagcgagaatcacaggtataacatagcacatagcatatagcatacaaacatgattttgaccatgtttatactcgaaaaatggccacggactgatgaagcactcacttagtggcttgtgcttggtgacccaaccctccactggcccgagcctcgagtacccgtgagggcaatgctcagtcattccatacacacggaccaatgcatcttcatgcactgagaaggctgtgtcttcttgtatgtctatcatttacttttactttaacatcactttgcatatatccgctctcttcgcgacatcggacttgcgcgcaagcggagtcgctcaaggtgcaagactacttgcaaaggtcgacaaaatacctgatagcactctactaatttgcaactctctacctcacagccctttgacctccctcgtcagctcaagctcatcacctcgccagccatgtcatggtccacacccaaattaccaccctccgagtctaagaagggactgttgtcctcgcccaagacgctgttcggcaccccttcgacggtgaacaaccaggacaggactggccagtcccccgaggtcgaacatcgccacgacaggatgggcagtttcggaatggtcgagacggacgacgtgggtaggagtatgaaccgatccaggttcagtacgtttgctagttccaagcgtgctggcccaaacgaactccctgcgaacaattgggaaaacgacctggaccgcgatcaagtgctgcagcccgattatggtcgtgcgaaacatatcagctcgatgttccagacgaaccccatgctcaacctttattcggacgataccgccaacgctacggcttcgacgaggatgccctttgattcaccttcctctccaccgcatctgccgggcagcatcgcccaaacaccccggcgggacggaggtggaggtgggctaggggaggaggacgagatcgatctgagacctccgccgagcgtccatgacccttatgtcgctgcccaaaagacgagcgcggaacagctcaggaggaggttggaacatgagaggaacgcatcggccgctccgcaagaggtcgagatgaattcgagcatcgccatgcaggaacagttggccaagatctttgatctgcagatgcagctcgctgacatgcatggagagatggaaggcatcaacgagatcgtgcgggacgaagacttggaggatgggcaacacgataaaaaggacgaagcgagtaggaaggaggacttgacgaggtcgcccaagacccctgtcacctcgcccaaatcgaaagccggtcgggccgccttgtcaccgaaatctcctgcaaaggatctcgataacaagaagaacaaggagcaggataaggaagagtttgatcagacggaagcgccggatcgaccggggatgaggagagagcagcagattggcgatattgtcgccaaggcaagtccatcccagctttgtgtcgaagacaagtccagctgatcctgtctttgtcattcagctctcggacctgtcttcgcttctgcatcaattccactcgatgcctcatcccaacctcgattcggcctttccgccttcccccacatcggccagctcgtttttcaagcaaaacgtaacgcaggaggtcgccagccgacgatctgccgcgggtagggagagggctcagccggccgcatgataatccactgagaagacggctggcacataaatgctctagaggatggtgatacagtcaaaagtgcaggaagatacaaacggtttatagtgaagcgaggtcgagcttcatactacgcttcagccttgactccccacaagacctggctcacccggaccaccttgacacggctcatctcgtctccttcccaacgcgagacgcatatccgatagtctccctcggcaacctcgaaagtctcgctgtcgctcttccagcgtgcaactgggtcgagccggcatcgaatatggatgctcgactctgctcctacatcgatagtaggtgttcgggtgaacccaatcaggaccctttcgtagtcctccgaaccggatcgctcgacctggcccgcgtagatctggaccacggtggacgacgcatacccacccttgttctggacgactacgtcaatgtcgaagaatctgctccgcacctcgtccaacccgtcgagatgcgtccggacgatctgcacgtcgccgaatcctagcccaaaaccaaagggataggcaggacgtttttgctctcgttgtaacaatcgataaccccaaaaacgatcatatgttaccgacttggaggtcatgtcgagtcgagggagatcgtcttcagactctacgatcccgtaggcgagacgacctgccggctcagacctgccaaagatgacgtcgcagagtgccgtaccaaagtgacacccgccgtacccggtgaagaggatggccgacgtcttttctctgacggatcgagggatgatgacgggcccactggcctcgacgccgagaatcatcttgtgaccgaccacttcggccaactcgccgatcagcatctcgtcccctggtctcaatcgtagattaatacggtctccaccgggcaatttgcccttgaatttttcgtacacgccgatcatgttgttgacgatcacgctaaaaatcttggcgacgaaacgccgaggaaatacgtaggggagcgtagcggcaagcgtgtcggcgtcaaaggtcgagacgtattctccctcgtccgtagcagtgtacccgacgaggacaaagacggcatcagcggtcgagctggctcgctcgatcgccttgaggtcggtcccgtcaaagtagacgatttcgacggcaggctgtgcttcgagacctttcagtggagagacggtcgtcttgtccacgaggttagaggacccggcatcacccgtctgagtcgacttggcgagctcaccgacgacgacgatccgtcggcacgattctggagcaagaggaagcatgcgtctcgtagaggattctggcttgtcgttctttagcaagaccatgccttgactggcgaccttgcgtgcgagctggcgatgcgcttgacatccgacgacatccgcttgtgatggttcctccgtaccgtgcctcttgacgtaatgttccaattgcatcttgatcacccgcttcccgatccgctcgatcggctgccaatcgatcttgccccggttcaaagctttcggcaagtgtttcgaccgggtcgattggagaggcatctcgacgtccagaccggcctttacggatttgacggcgtctcgactgccccagacccagtccgagctaacgacgacgtcttcctgaccccagacgttacggatgactccgttcagcagagcagcactgtccccgcaaaactcgccgttgaccgaattgtaagccgacatgatactttctgcgcctccctcttccaagcactggcgaaagtgaggcagaaaacactcgtgcaagacgtcctgtggacaagtgacatcgacctggaacctcaggttctccatagagtttagagcgaaatgtttggcgcaaacgatcgtattctggcgagcacccaaggtgaggcctgtacccatgctcccgatgagaagaggatcttcaccataggattcttgcatacggccccagagcgggctgtacccaaggttgacacataccccggcaaagtagttggctccgtgagcccgggcttccttgcctatcgccacgccctgcgaatatatagcaggtcgtcagctccaatgtgacgactaaagtaggaccggtcggatagacttgccacttgttcctcaagaagcggatcccaagtacaggccctggtggaggatgtaggaaatgccgtgcaattatgccccatcaagatccctcgcggtccatcagtgaacctgatcccagggatccctaatcgcttgatgacccccgagtcgtgcggcctgaaacagtacccctcggcgatgtaccgagcggcaaactgtttcgtgctcgaatccccgtccaagagccccagccgctctttgggggagagcagggcgtagagggtttccgccgatttgatcgtgtccgacttgcccgcgacgatgagctcgatttgagagtcaaacgcggtcatatcggagactggctacctggccttgagaagaacaggtctatggatacgtcttcagatctcaacggtgagtataagaatcgataaatgtgatatagtggcggttatgatgcacaggtatcgcttcgaccatcacttcgaccttttgtccttttcggtcaaatccgataaaggtgacgtcgatcgggaaaaaatcatcgagatcaggtggcagtagtagtatactgtagacgatagtcgacatggttgagacttcaatatcaaaggtcatcaaggtcaggcatgaggcaagcatgaagtcggaacaatgcacggactatcgtaaaggtcgaagaggttcgagctgcacggaacggtcgctcaacttcaacacctaccaattcggttggggacgacgatgacccgaaccagcccgaccttggcaagatcgttcccgctctctccagaatcaagagggtcggcatcgagctccaacaacctccacaaccgcttcacagtctcgaacttgaacatgaatcccagcagtcaagaagaccgactttgcgaaccccatacgcttcgggtcgattttccataaatagatcgatcgtgataggaggaatacttgatagcgacaggcaaagaatcgggtcgagcgagccgagccgagcgagttgtagaggggaggagggggaaagtgggggatccgcaccacccctccccccctcgtgtgatgagatccgagtgcccccatgctcattcgtcccgacgttgcagacgagtggttcaggatctacaagatccccgatggcaagcccgagaacgtctttgccttttccggagaggcaaagtcgaaaaagtacgccgtcgaaatcatccacgagaccaacgagtcgtggaaaaagctcgtcggtggagaggtcgctgccaagaccgcttcgtacgacttgtccatgtgagtaccgcacctcactgcactacactatgctccgggcgccgattagatgagatgacgggtcgctgatgtgaattgttttttgttgcgacgacgtagcaccaactcgaccgtcgagggatcttcgggatacacccaggacaccagcgccgtccccgccgactctaggcaacccgctgctcctatcgattcgtcgagtgagtccctcccagtcctttccctcaagcgggttcggggcgtggaccccggccccacccgattgaggaccacagcgctaatcactttgcacctcgacctcaaccctcgtctcacccgatcgcgcagtcgacaagagcttcttcatctcctcggcttcggtttgaatcggacatggatatggcccgtcgggcggagaattgtcgaggatgtaaaacgtcgtcggctaggatgtcggatcgatatgagatatgatgatgatgtctatcaatatgatgcgatgtgatgcgatgcgatgcgtgacccatacgatactcttgcggagcttgcactcacgatacatgcggcaagcgaggaacagagatagatatcaaggcagatcaaagagctgaacgggcagtgctgacgaggattgatgggggcgatgtgggactgaacattaggacgagcatgtcgagcaagggaggggagacgtcgagaggaggacgagcaaggtttcgcggacggccaagggtcgcgatccaggaaggatgacgattacaataccttccaccaacgggttcctctgcgttctctccttactatattgtaaccaagagtttctactaccagagttcgacggaagtgtctcactcggcgccaaaacaagtgataaatcacagcgttttgcatgatgatagatcatccccaagatcttcaggcgtcacatacgatacaaatgaatgatccacattgtcccacctcgcgacagcagacgggaggacgatccggacctgcgggaacatgacagacccccggaccgaggtcgatccccagctataggctgccatgctcgaaacagccctgggcatggtggcccagatccgtgaacggcatcggcttccgatgatcggcattggctgccaacggtctacgaggcacacctcattgccgagaccgacaggtttatcaacaccaggacccagcttgttcctgagctacagggtgccatgttcaatgcagtctccaccttggctgtgaagatgtcaaccatcaagactatctggtttagataccaaaggagtgcttcggcaatgttccacatgatcggcatcaatgcccttcccctcccgccaccacagctcgcaataatgtacccgttcaccgtcgacgttgtgatcaaaaccgaagccgcggcgtaccaccctatcaagggttcagacatcgaccaggccatcgaagacttgcgccaaaagatcaacaatgtgaagggtgcccagaagcgcacttccaaaatcgccttcgtcaacatggatgacgaacgcgatgtcctcttgcaccccgacaaagtcctcttctctggactggtccaccacgacctgcgctcttcgcccacgtggtatcactcggtcgggcctccagtttgaggcagtatctatggctcggcgacagcagctccaaggagcactggaattgcacgtgccgccgaaatgccaggaaaaggtactgacctaccgtcctaggccgaagcttgttccaaagggagaaatagagacgagacgctgccgaggcccccgttgagcccgccaccaagacccccgtcgagcccatcgaggaggccgccaccgtcaagccagccgccgagtcccccgtcgagcccgtcgacaaggctctcgccgaggccgtcatcgaggactgggacagcgatttcgatttcctattcgacgaagaggatgacgaggacgaggaagacgacggctacgaggatttcgagtatattgagtactaggttcgtacgtttgaagcccccctcgcaccggttcatctcgctaagatcgatttcgttcttgttacagcgtccctgttgccgccagccgaagccttcttgtcggcttcgagttcttgttcgccagtttccgtcggtcttgcttgtttgtcgtgccttgtacctctcgtagaccttccttgttccggaccctcgcgatgagatacattgcgtcgttacatgtcgttcacattgcagggcggtcctgccattcaatcgtcgggttgcgcccttatataatgtcttgccctcccaccaggccaagtgcattatatcattgtcacaaggcattgaccagatcgcactaggtcgtaaaatgcgcgatccctaccgactacaattgtgtacgatctctcaacgcagatcgctggagtgcaacgcttgcagatctctctctgtatcgagtctgatgcatgagcatctaagttgctctttctagtcaagcatctcgatcgtcatatgaatatgtatacagtagtgtatcgaacagtacaatgtctagactcgtcttgtctttccggtaggtgcgtcgtaccaggtcttcagcgccttgccaccttcctgtcccaaggcgaacactggccagagaacacatatgtacctcagccgacttcttcgataagcggggattacggggccgagacttacgttcacgttcttcagcatccattccttccttgaaagcttctcccgcgatcgtcactccgcccgagcccatgtcccccgtatttgtgttcgtagccgaggacgatccgtaatgcgcggcgagatcttgaagcagcggtaatcgctgagagaatgcctgtacgtagtgctcatccgtgagtgtttgttctcagattgcgcggtcaacatgaggcccagtcaccttcaacagagtgcccaggagttctttgcgttgagcgtcgtcgagactgagaacggcaacgtatcatgagtcgaagtagtgagaatacgagaatctgacctcctcacatatgtgctatccgtcgaccccaagcataccaccagccgttcgttcccaccaagcttgacaacctgacggagtgcgccgaagcgttcaaggcagacctcactctgtgggagtagggcggtgggatcgggaacgacgtgaattcactgctcgaaaaggagttgatcagcttcgcgatcatagtcgtcagaggcatagtcgttgaaagactgacttggcgctgagcgtatgtgccaaccagaatggcaattcggctttcgagtgttgcttgatctgccggtcaagtgtcagtgaagctcagcccgagtagcagtcgacgcatcgtccgtgtctcacatccggctcggatcctccttccaagtaacctaaacccttgacatcgagattgaacgtacaggttaatttctattgacatcgcgtccgaggaagagttacatcagctcgaagttagtccggcgctacaatctcaacttgcatgggtatcggcgatgatggaattgatcgagtagtagtcctcctccatcccaggaatttcgttaagccgtccaggctgctatcgaccttgatccgcaagtgacaaagggcttcagtttgcatcaagagtatcattagtatcgtaagtatacaagcgatttggacacgaacgcggttgttctttggcccgaggtgagcgtgttttggatttcgcggctcaccgaccggcagcaagccgacgagcaaagtacgtcttcactatccggtagtgtctattacttggacgacgacccaggttgtatcatcttcagcagcccaacagcaagtcagcttgatagcatattagcattctgagagaccaccacacctattgtccgattccgatcgagcccggtcttgagcttcgagcgctggccgcacattagaacacaccgctcttccggatgctcagcgaagttcgctctgtgaagtactaggacgcaagctggacccctgatcgcaggtactgtagatatgacagtgactaagagaagagtcaagacagatacgggggttgagggcagtggtgagtccctgcgcgatctttcaggtagcttgttctaacgagtgacgactggtgctagcggcaaccgagcctggtaagcgatctgtctccaccaccttcagcttgtcagatggctgacgactgttatattctaggcattcaatacacctgcgatgcctgtatgtcacagatccctgtcagacttggtcgtcagcccgcttgacgacgtctctgtgtttgttcaggctcaatcgatataacacacacggtccggataaagtgtgcggctcaaggctgtgaagaagtggatctctgccccaattgcttctccgaaggcaaagaactcggtgggcacaaagcatggcatgattaccgagttgtcgtgagtcgaggcagtgctgtgtggttgatcaaatcgactgtctgacatgcatctatcatatacaggagacccactcgagaccgatcttttcagaggattggggtgccgacgagtgaggatgcactacccttttacaactgtggaaatactcatcaatctgcttgctttgctttcctcggaatcgaaagggaattgctgctcatctcgggtctccaaacatatggcctagggaactgggctgaagtcgctgattatgtcggtactagactcaaagaggattgcgagcggcactatacggaaacgtatctcgctgagcgttcttcgacgaagaaggacgtacatcggcgcgatcccaatggcaagcaaaatggccattcgacgactgatcgagacgaagacgatgtcacgggccggtctagttcacaagagctgtttgccaatgcatacggggaaatgcaacacgatggactttgcaccaccgcgagcgtgatcaatagtatcggaggcgtgggcggctttggtcgggtcactacatcaggacagctcggcaagaagcgaagacaaggctggtggggtggtctacctgtaggagaaggctggacctgtccgatgccggtaagaatgcttcctgatgcacgagaattggccactaatgctgactgacaacaaatttatcctatcctccagcgaatgaaagcgcgtttcgaaatcacccaggaggaatttcaaagtcgtaaaaagcggcggatagaagaacttcggaaaccagctcgtaagtacaaacacgatcctgggcgatggccgcggcctgaacggcatgtctccctttgatcagctcttccagctgccgcaatcgagaccaaggcgtcagctccccaaaatcacgaagttgcaggttacatgcctggacgtcttgaattcgatcacgaggtggagaatgaggcagaaatggtcatcaaggacatggacttcggcctcgtattcgcttacggcggtgatggaatgcgggaaggtactccaccagctggcggccgagacgggatagggaacgagcccgacgatgatgcagacgaagatgccagggctgccaggcctcaacagcagagcgcgaaaacggtcggcagtaccactgccacaaaaacagcaggaggtaaaggatcggcttcgaaaaagcccgcgggcgcgcaatccgctggcgatacttctgtcgtcaatgccatggacgtggatgaagcgggagatgaagaggatcgaccactcgcgcaactggtggatgccgtcaaccacgacaccgcacgggacagtaactccaagcgaaaagggaaggacgaaggtgaagaggagaaggctccagccgtgactctggaagaagaagacctggaagacatggaattgaagttgatcgtgctcgaggtgtactactcacggcttggtaaacggcaacaagccaaggactttatcttcgaccggggcttgatggactacaagagggtgcgttcgttctttctccacttgtgcgtgccttagctgaccagctttgcgctttcctccagctgatggctcaggaaaagaagagaggaaaagaagaagccggtctgatcaatcgctataaggtcttcgcgaagatgcagacagcggaagacttcgaggtgttggtcgacgggctaatctgtaagtcgcaaagtcgcttagcaggaaaaaagaccggctttgaagctgacacctccttacagatgagcagacattgcgaaagaagatcgccgaattgcaggattatcggcgaaatggcgtaacgactatcgcggacgctttgagattcgatcgcttgaggaacgagagagtacgtctttgttttctcctcgaagtcattttcggtcgacgaaaccctcatgtcgccatcgtcttcgacaggcaagcggcgttcgccctggacagggaccggtcccgcgggaacctatgacgtcgagtgatgccattttacaacggcgaagttatggcggcggcgattcagtcttacaggacaaagtcgccaagaccccgtatccaggtcgtaagttgctcgcactgtttgattccaacatccatggctgagcagccacttcgacatacacagctccattgcatttcttgcatgccgatgatctgcagctcctcagtcccgaagagcaaacgctttgctgcgaattgcacgtcttgcctcgtccatacctgctcatcaaagacgccattgtcagggagtgtgcccgtcgaggaggcgatttgcagcgacacgatgctgggtatgtcactgtctgcgagcggggtcatgaactgcaactgattgatcatatcttccagtcgactcttcgagattccgtatgacatcacttgcgccatctttgatcacctgcgaacaagtgggattctcatcgatatttagatggacgaaatgagacagttgtatcgatagcattgggcatagcacagcggccagaataataattgtaattcaaaaggccagcctcttcaaattgccgtacatctattcggtatcctgcacaccactgtatcgctccagcttttcgcaagcctgctcccaggaagtctggccgttgcacagatcggccacgacagctacgacgtcttcgaccgatccgataagctggtcggtagtatcgcgctcacgaacggtcaaagtcctcttggatacggctgttcagatggcagtgacgtttagatcgatgggttctttctagagatatgctgctggcggcacttacaggcaaagtcgatggtcagaccgtatggggttccgagctcgtcgttacgggcatatcgcttgccgatactggctcccgaagcatcgactcgggacggcacaccagcctttcggagcttcgaagctgagaaacacagcggagcttagtatgactcttctgggcgaggccatacatgagtgggcttactgatctcattcaagagcgggttgaaagcatcgttgttggagagggggacgatgagacacttgattggtgcgaccatagcgggcaacgacaaaacctataaagaagagacgctcaacgcttgacagtcagacggcccttgcatcaaaagtacccactccacggttgacgtcggattcacgagcccagtagctgtgttcgagcaacgagtaaaggatacgaccgattccgaaggaaggctcgatgacgttgggagtgaactctcgtactgtgcccgcgccaacgtatcagcgagttggaacttatacagcaataccgccgctactgaccatattcggtgacggtcttcttttcgaccttgaccaaatcagaggtgataatgtgttcagtaccctcggcatcaacgggagcttgactgcgaagcaaagcggtaatatttagcttataagccgtgaaattgattcttgcccatcaacttgcccttgggagtcgagcgcgttcttgaacttggtcatctcgtcggcctcgagcgcagtaatagcggcctggatgtttcgggcgtccttcttgaatttcataccgaaggccttggcttcgaagacgggctcaagcttgtcgtagacgttgggttcgctcagtgtctccttgacgaccaacttctgcttagtcttgtttgcgtggacggtcaaatcatacgcagatcggtcggcgcaaccgacacactcgatccacccgtaagaagactggatctcgaagtcccagcagtcctgtcaagaaaatgtgatcagactgtgtagcggccatgccagagtcgtctgctacttacagaggcgtaatgagccatctcgttggacatatgctgcctgcatcgcagacgcttagggtcgataccgatcttggtcaagaacaagtagattcgtcccaagaagtatcccaaggtctcgttgtcaacgatgccctgcagacccgacatggtcagtctcgacggactgcgagctctcggcatagacgggcgttcggctcaccttgtcaacagcgtctccgatcgacatttgagtcaaggtggtctcaccgccctcctgaacttctttaggcaacaagttgaggacgatgtcctttgcttcggcgtaacgggggtgccttttgtccttggggtcaacgtagtgctcgatctcggccatagtgaattctctggcagacccacgtcaaccatcaaatcagtaaataattcccagaagatggccagacgaggcaccatcactgaccggactcgcagcaatccttgcttgggagagatttcgttcctgaacgattttccgatctgagcactggcgaaaggcactcgaccgttgttgaagtcgagcaatcgaccaaagttgacaaagtgaccctgagcggtctcgggtcgaaggtatctgcgagaatcaagaaagattgagcgggactgtcgaacgtagctcaacaacatgcgacgtaccccttgatctgtccggtaggtccgatctgagactcaaacatcaagttgaactcgacgggatcggtcaattcgttgccagtctctgggttgacgatggtgtacttcttgatgatctctccaagttgggggccggtaaagttgtcgatctgcgagatgatgcgagattagcaatcacgcccggaacagctacattcgtgggaccaaagcatgtgtcactaacctgggccaagaggctctcgtactcctgaacagtagcatcctcgagcttgacagcggtcgacttgacgaccttcttctttttcttcttcttgtcgtcctcgacctcagggatggcagcctgtccacgggcttctcggtctcccttcaatcgagcctcgaggacggcctcgacgaggtggtcggttcggaagatctcgccggtcttggtgtctttgaccatccagtcggcgaacctggtggcgagagcacatcatgagcgactgcatacatgccgacgggagaccgcctgagcgagcttacttgtcaacgtgaccggacgtcttgaggacgtcgtgcaaggtcatgatcgtcgtgtcaagctccgacatgtcctcctcgatgatgaaatgcttcctccaggcgtccaagatgttggactggagcgaggatcctggtggaccatagtcgtagagtccggcaacacctgatcgttcgaagaagccccgaggacggacgatcagctgcagacgtcgaggtgtggctcgcccgctagactcacctccatagatctcaaaagcaggagcaaagaagaaccgcctgctcaacagactatcgaacaagatcttatcaaactcgtggtgagacctgttgacgacggtcggctccggggcagcgagggtgttgggttgagcggcagaggcggacgtcatttttcgggtatcagtgaggattttcgcggctcgtgttattctagtcagggaaccaaatctgttcgttgtcatccgttgtctggacttagattttcgaccaaaacagcagtgagctatgagcgttttacattggggatgtcgagtcaagaggaatagatgttcccgaaaaaggtcgacaagctacaacgatccggcgtcgagagcgtcccaggcgacgcggaaaatggataaacaggaagctagaaaagtaaagttacgaatattgcgtttcaaagcgatgtttgaggaaaggcttcacccgttgcaagcaaggaccaggctggacacccacgtccggccccataatttgcgagaggtaatcttagcttgccttttcgatggaggcctcgatcgcaagctcggcgggagccttggcacatacctgttccggtaccaagggcggtacatttcgtctggatataactgaatcagcgtcatgttatgattcatcttgcaattcaccctcaacagtgaccctgcttttcttgttgatcgctgcgtcgtcaaaccatttttcctcttcgcctgtctggcatgcatgcctcccatcagagctagctttggctgaagaaggtcggggattcagtagcttctcctgagactcgggcggtacatgaaggcctgacccttcctgctgcaattgcgtgaccctttcattgaaattacttcgaattgtagctcgtcaaagtgataagaagctgggctgcttcggactgcttcggatatatccatgaccccggtgaagaccatcttgcacctcgtcgggatgcgataggacgcgtgcatcgccgtcaccattgtagaacgggattgcgtgcgtcgccgtctctgtagaacaggatttttgcgaggcccttctgggcacccataacgttgccgatgttcgaaaatgtgcggccgctcaggtgcccgtaaaacagactcggtacaagcctttcactctgacgagcagccttttaaagctatacgtttgcatgcagcagagaggtcgcggtttgaccatcttaagcgatctggcggaaccgatacgatacacttcagcagctggcgacggggcgatacatcacataggacgtgagtcgatcttgagtggcaagaccgccctggacgatatcaagataaaatgatgccatcgcgtcggtcccgaacaaggatacaggtcgtttgctacactgcgaagagtctcagacagagggaacaacaaatcggactagaggaagaagggacttgaggaagggaacgttgcaggcgggaacaacagatcggactagaggaagaaaacgttgaaggcgggaacaggaaggctgtgaagcaagaagcaagccactcttcgcaagatggactggtaggacgctttagttttggacctacgatctagtacgcgaagaactcaaagtattcggaatatccgaagtagtcgaaataatcgaggtcactgaagtcctcgaacacgtcaagctcgactgcctcacccccgacgtcagcgttggtcagcatgccgccgacagcagcaccagcaaggacgctctggatgggagaattggcgggggtctcggcagacgcctcgacgggggtctcgatggcggtctcgttggcggtctgggtagggtcctcgtcggcgttttgcgtcagggcctcgacgagggcttcttcggcgctctcgacgacgatctgggcgaggtcttcgttggcattttcggtaagggcctcgacgagggcttcggcagcgctctcgacggcgatctgggcgagggtctcagcggggtcctcgacaacggcctcggcagggtcctcgacagcggcctcggcagggtccttgacaacggcctgcgcggggtttcgggcccgacgcctaagtcgagcctcgtcggcaacccgccgttgtgaggccctcttcctcttgcgagacctgcgtcttccgttccggggtgagaatccccctcataccggggccggagtacgatgcggaggtctcccaggacctaggtggcgaaagggaaccgaccgtcccgcggatgtccaagtcgagccggttttgtagctgcgagacgcgtacgtccgagccggcctcgaattccaaggaagcgaagatgaacctcgcaggttcaattgtgcgattgaaccgcacgataccagtaaactggacctcatcgggctgaagacccgcggggtaagcttcatcctgctgatcaccctcgacgccgcggattttggtggccaaatctcttgagacctcctccaagtcgccgttgatggggtggacggcagggacttcggcgaccaagacaacgtcgatgaagaaagttgacatggtgttggtatgaaagaagatctaaattgcagcgcggctgttaggtatggtgaggtgatcaagaagcaagaaggctgtgatgtagttcgaacggttcgttgtgatgtgtcttgttacttgtagtaaaggtggcatccatcgtcacaaccattggctggttataaacgtccgcagcctcctcccttctcctgtgctgcttgtgctgcttgtccagctgtcccagctgacccgtggaatcgtctgatgtccgtgtattgccaagacttccagcgtatcgtatttgaccagagctttaacgcgaacgcgcgtgtagggtgctgtgctggcaggtccgttgtgatgcgatgactcgatgtcgcctcctgctcctgctcctcctgctcctcctccccctgtggtgctgtgctgtgctgtcgcccccgtgaccctgtgacctatgccatgccggggtgctgtcgtgtcgtcaccggcagctgaccacctgatggagccagccagacgagtataaatcaaaatcgattttgggtcgaccccccttttcccctcttcatcctcaactctcctctcttcttcatcacaccgagcctcaagccttatactcgatgttgaacttcaagtagatggtagtcgaagtgtaagtcttctgtccttgctctcgttcaagtcccattcgatgtaacccctattcccctcacgacgcgtcccggtccagatcgtgatcacatcgttcgacctttgctgatgtcggtctcacttctcgcaggtcgttgtaatactcatgacactaggtcatcctctcttatgttcgtcgtgtgcactaaatatctgtgagtcaccctagcccggctgccggcaacgctacgcatcggaacagtcccaccgacggtatgtctccaacgtctacggccggtctccttcttcacagtctcgaactgatggtgacgggcatgtctgctgacacagttgtcggtgtccatattggaggggtctcattcgtcctgggaaccggtctcccccagtctcaccggctggacgtaccgctaggcttcgaggacgaatccctctcgtaccagacttcctagaggcgaggtcgggagggcggcaacgaagagcctagtctgtatccgttcgctggcgaatcctacaacccggcctcggtaaggggctgagaaggtcacattccagcctgtgccgaatccgggttggcgtctcacaagcgccgactcgtgatgaggtccgggtctcgtcaccgccggccccgggttgagattggccgccagcagccattaggtcagcgatacaatcgaagccgccccttgacgacgtggccctcgtggtcgcgaagattctctggaccacgcttggcaaggtcatcgtacctcgtgagttcgagtcgctgtcttctcgtgatacccccggcgtactgaacctttgcgatcgatgatagcaggaccgccggccacccctcgggcaatccccatcggcggtacggcctctcgaaatccgcgttgtacttcattgtgggtcaggcgacaacgacgtcgagaggtgtcccggccgtcgatgttccctctacgggaggaaactcattcatcctgggaaacggacttctttccgggctgcaacggtaatgagaagacaccgccaggctccgacggacgaatccctcttgcaccgtcaggtcgggagggcggcacgcaagcgcctagtctagtatccatcgctggcgtatcctccttggttgggactcagcagcgagcgggcattgatcttggttctccggaagcggtgcttaggcattgtcgaaggggttccttgaaccttgtcactcgtgccctccttcattggactggcagctgcaggtggccttgggattggccgtcaagctgccgcttggttagcgatacaaatcggagccgccccttgacgacgtgaccctcacgggtcgcgaagagtttccgcgatcaggcgtcctggatcatcggatagggtgagttcttcgttccttcttgatcttcgatgtcggtcgctttgctcagcgaacgcatgcttcatcacaagattcgtggcccgccatctggccaccgcgtggaccaattagccagatgattgatcgtgctccagtaagtcgatgtactagcaacggatagcatatactgatcgaacgtcgaacgctggcgtgtctgtagctgtcgccggtcttcaagccggaacggttgtcgcaccaaccggcttgcacaaacacaaccagcagcggccttcttgacccgtaagtcgatttcgtctgcaaccccgcgagtctcctggtcgagcgctgaaggtcgaacgaaaacagttacgacaccgacagcggcaagagatatcgcttgcgaatcccaacaatggaaccggtttatccgggtgagtcccgcgagttgtatccaccatcgaatcccatcgctaaagttcgactttgatgcattcatagtccgtcgcgccagccgactcttcaagaaatctcaacaatctggtcttcgcaaattggacctagtcggccggcaccaggaagggataggggaggctaaagtcaatggtattcctgggttttgcgatgtttgttcttgtatacggggttagacctgccgatctatcattcgtctccacaccttcccgccgagttgcattcgttgccgttgaacagtaagttgattaagggtaagtttgggaagctgaaccgcagcggacgagatgcagtaatagtagtggccgcttgcatgtcgaaccaaagacgagacatcgctcttctgtcttctggttgattgtaggttgtgcgtgaaatcgcctggcgcctgacgaccaggaccatcgagctggttttaatccatataagtccgaataatctcgcgcgatcatcgacgtggcgataaccttcccgttcgaataagctatgttgacgattccatccggtcgagatgctcttcggtattaaaaatcatgcccataaggcaagttcctatttctactgctgtgtaggtcgcttcgaagggctggggaaccccgattggttgaagcgtcgccaccggaccaagaagcgcaacaccgcaaaggggggccgcgtgcgcgttgctcccccgtccaatcagctccgcactgccaatccgagccttccagcgaattgggtaattttcctgggttacccagtggatggttgatattctgcatgtgaatggaaagcctagatgcattagtgaatcgatgtatcgagagacacgcacctagataatgaaacggaaaccgcatcgaccttgtctgcaaccgcatcccgtgtattttttgcgttgaccggtcaaaaggatgggaagacgggtttacgctcagataaggtcgacgcttctgtcctgcacagtcacgttggaaagtcttttgcctgtgtcggtaggtattgcgaaccgacgcgctcaagtcgaggtggcactatgtcaatgtcgatgcctctgatatcgctcagtagataccgacccggctcctagccggtggcaaggaagagctcgaagagggaaatctggcagaacgcctgattccaattaggcgacatataggtgaagagtcgagagacacgaattagagttgagttgaaagaataaccaagatcgactcgatgggagatgggagatggacgcgggaaccagatgattcatggattacccatcccagcaagttgacatgacaagagcttgaagagtcgtgggaaagctcgactcatcccgctggctcggttcattgccgtgagaatgaaaataggagagcgacgcgctctttcgaatacgttgtctcacgctgtctcacgcttcgcaagcgggggtcttgaacccaatcaccttggctagcttcgactcaaacccaatcatccccgtgatcgaaagaatcaaaggaccttgtcgacgttccattggctgccatgacactcttttgtcgtcgtgtggatctccggcgatcacggagaacgtcgctggaacggatatcgagatacacgctgctcggccaacctcggcattaccttgccgacctacctcacggcgagcacgaaacctggtgattgtcaaggacatgaccatcatccccggatcaccgatattcagcacaaatccgtgtgtcatggtctggaccgaatcttatggccgtcgatgtcgacctatcgtaaatccaggcagtgagaatcttcaccctggtcgatttttcacgttggcggtcgacagccccgcattcggcatgatcgacagccaccgggttcttttgtcttgaatcgagatcgaaccgctccctagtatcgtcctcctgcatcacgtatcattctgcgttcaagagattctacggctgacgcattgaaagcctttcgttcagatcagcgatcgccattcaccatatagtcaaccaccactttcggcgatgggatgtaactataacgcacacggcgagattacagcatgtggggacgctcgcactcatgggcatcaacggaatggtcacaagcgaaggcttccttgagactcagagcgctggatcttgatagccatcaaagaacaccaacagctttttcgacctcgctgccactcggactctgcgcgagctgcggaacgacgggtcgagtcgaattcgatcactcgggaatcaatagacattagcactgcttcggacctgtacaagtattgcctattgagaatgggtcaagcactggttttaggtcgataaagcaggccatctcaacgagattggtcgacccttctaccaccaaaacgggacatgaaactttggacgaaaagcgcgcctccttgaattggaaaagatcccgctggatctcaagcgctgcatcgtgattcctcctgggcgattgcctctttggaggaggattacgaagcgatcatccgcggatcatcgagaaaagaagcacaagttgccgatccaccgatgacgccatatcccagatttcaaatgaaaatggacgattcgcagcaagtcaggtgacgacggagaagcacttagcagacgaaaaggcatataaacgaccacattcgcaaacacacgaaaacaggacctagatcggtcaacatatcacttcgttaatctcgtcccattccgctcactccccttatatcaaacaacgaactactcaaagatcatcgagatgcaagagcaatacacctttacccttccccgtcaagcttcgcagagcaccttggcccagcccgtccttcccggtgcgagaggcggcagaccttgtcaatggacaacacccaaacagtgtggacattaatctacctagctcctgctctcatggtcagaccatctttgcaagggacttgttgtggtagaagaagttgtcagggcggcagatctggcgacccacccgggcacctagggactcaaatcgcctacttcctgctctcgtggctgggtcatcccgccgaggcactcgtgtcagtagaagaggttgtcagggatgacgatctcttggccatcgtgagttcagcaacacgaacaatgaccccaaagttactccggcgccgacagcatgctgatcaacgcaatggatagaccctccaagggagggatgacggcagcgtcttgcggctcgcccgagccgtcaccgggaagttccagcaagtcttccggcgccggtctgctggtgagtgactcaagccgtgatcgttcgggctagcttttgactgtcctttgctctatcgcctgcaggtatccgtgtctatcggaatgatgacgctacccagtgggtacacatccgggacgtgaccctcacgcccaacgtgccggcggggggaccaccccttattgtggccctgcgggccgcctacttgcacatggaaagcttgggtgtccagctcgtcaacatcgtcagggtcgaccggaacaagttccggacaaccggactcacacggtgcaacgagccgatcgctgtggacgacgccgtgatgtcgggcctggtagtgttccccaatgccaccatgccgcatagcgacatcatcgaccatgtgcagcaggcggcaggccttgtcaatggacaacacctagatagggtacatactcaaattacttacctcctgctctcatgattggcccaccattctgaggatcttattgtggtagaagaggcaatcagggaccgggattcacaggaatcccgtctttgtcgggaacgccggccggaatggcttgatttcgccaagaaatcaagacactccaaggatatgccccaccggcgtcgatcgccgacaacatcatcacgacccgcgtcgaccataaggacgaccagtcacctcgggtggcaccgaggctctccatcatcaccgggacgataaccgcgatcggcggctcgggtccggaaccacctttgtccgcgtcgacttgagaaccccgacccgagaccggatctgaaggcttcgtcgagggtgatgtcagcgatcccgcatcgacgatcggtggatagtgccaccttatagccgaagcccgggccacaggacgatccgtctggacaggagtggcgacgccaggatcgtcgcctcatgtggtgcgctccgcttccggtcaccttgtccacccatcatcgccttctctcctccggcgtcccgcccgcaatgccgaaatacccgaaaaacagctgacgaggataccgctgccattgcgtgccttctcgggatgattctcggagcttcaaaatcgaaaacagctgcacgtctggaattccttgtatacgctttctcctcgtttctaattcctgtttgtgactgcatacaaatatattccttcttcatatttcgatatattgtgataaggttcagcgaagccgcttccgcggaacgaaaatttagatggccaacgaccgctttcctcaggtgcacgagcaagggagtgtgggggcattcattcatctggccaactggtcaggctgtcgggctgggtcattagcatcgatacgtggccagggcaaaagattcagcgccacaaaggactgtcactgccctccttgcggcaccagtgactgaacgcacccctcttccacaagcaacgctcactggcctctcgtaacgacaccaccaacgacaccgacaacgataccaacaacaagacttagcgtctatctcgatcaacgcctttcccctctgttacggcggagcttcgctaaatcgcgtctaatgaatatctgagtgcaaggtcggtacggatcgtaggtagtcacaacaggaggggagccgagtttggctaacgggagcgaaatggttgggatgatacgaatccgggttgatgcacggataaggaagtaatgtcgctataggtagctaggatcgaaagcttgttcagtacgaacggtgagacgtctactacttagcgagtgtcctgggttgtaacctcttcacaatacgtcttgaagatgccccccctactacgttttctcacatcctggcatagcgacctcggtcattgttgtcgacgagacgaccactcgatcctagccagagtgcaagcaacgttgacctcgacctggaaagaggccaggggtcgtccgtccgacccgggatgtcgactcaccttcatcaacatcaacatcagcatcatcttgcaaacgggacgtcatctgtgacagggctgggcggcgaggaggagtacgatcctcacgatgtcgacccgtccttgctgagcgcggccgagcagggagatcgcaaggtgctcggcaataccaccagtaacactcacaaccagcacgggcatcatgggcgtggtcagcgattcgagcctcatcatcggcacctcgacgaccatgaacgtgggttgaatggggatggtgacgaggacgaggggaaccgtgatggtgacggagacgaggacgacgaccacgatcacgaccatgaacgccgggacgaagacgatcgggcgacctcgcaagggccaccagtctcgtccacttcctcggccaagggtaatcataccaccaactcgagcaaggcaggaggtggcacaaagaggaagaaaaaggacgacgagttgatcgtggaccccgaggctggaattgcaagtcgtcatccccggtcgtgatcacgccataccttgctccggtgcgctgaccgcgtatcgcatgtttcctcttttttttcctcctatcttttggtcatcgctgcctgtgtggtccatcattcggattcacatgatactgtctgtatcctaccacacacctcgcggtaccgtattgcatcgcatcgcaccgcattgcatgccacacgaccgatcccgaataccgcgccaaacagccgctacgaggtgaatccaggggcaggaagaaggacgatacgttacctcctagtcgtgagtgtcgaaatacgaatccgccccctcctgcctgccctcgtcgacctggttcttcagatcgacccgaaccccccacgcgtcccccgtgcgcaccatgtcgcacaattcgacgttcccatcgactgactcgtcccctttcctatcttacccattccctcccgtgcctgatgtgctcgcccgacccggaccttcacgatcgtcatcgaccacgaccaccccgtcgtccaccgcactaggcgctcgggatgtccaacgagcctttcgcgcacgacgtgcggcccacctggccaagctcgaagatcggatcctcgagctcgaagccgaaaacaaccggttacgcgccctcatggctttgcccaccgtcggtcgtgacgacttgggttcaggaccgaccggtcggggtaaatcgctcaaggagggcggggtgcccatggccgaacgcgtcaaggcgaaaaaggagagggacaggttacgcgctcaacaggccgcgaggttgaagggcatcttgccgccctctaacgaagaggtcgacaaggcgcatggacacgagttgctcggtgatctagatagccagacgccggacgattcgagcagccggcgcgacttgacaaggacaccggatagcggcgcaggatcgttgaggttgggcaggagtccgtcgtttggcatgttgacgacgccggggaccaacgtctctttggtcggcacgcctcatctcggggtcggaccggggatcggcgcgcaagatcattcggccgtgtcattgttgggactgcatcacaagatgccctttggctcaggggatcacacccctgggtcaaacggaccgaatcagaatctcggcaccaacaacaataacaacaacaaccaggtccaggcggatttacagagattgtatcagcaagccatcttggcgacccagctgtcgacgacgaacggcatgcaagcgcagaacaattggggacagggtagcccatcgatcgggatgaatcaggggggcggtccaggagggtactcgaacttgccttctggtcacaacctgggcaattcgtccggatctaccccgccagccaatttgccagacctcatcgccctgttgacggggatcacgaatcagcagtcccaacagcagcaacagattcaacagcagcagcggtccttgtccaacggccaacagcagcatcagaacggctttggaggcgatcacatgggccctcccggtggcgggccccagcaaccaggaggattgtcaaacctgtctttgccgatgccgttcccggcttcaaatgcaccgtcgtttccctcggcgccgtcgacgagcaacaacgggcagagttatggcggaggcggtcaaggatacacaaacggagggggtcccaacaatggtggcaataacaataacaacaacaacaataacagcaacaacccaaatctcaaccctttcccaaacttttcgttcaacccacccgcctcggctccgccccaattccccaacttcaacctccacgcctcgccccccgcgccccacctacctccacacaaccaaaacaacaacccgcaccacctacaaaacatggcaagaggtgggccacacatgggtctccgaacgtcgtcctttgggaatccgtctggcttaggctccagatcaccaggtgatatgcgaccgcctccgccaccaggaggcgagaacatgccttcgcggccacactcgtctgcgggacacaacgctctcggtctggatgccgacaagcagaggatgagatccgagagtgtcggcaagacgcagcagcaacatcaacaacatccacagcagcagcagcagccacaagctgcggcagacatgtcgagtcacgaggagggtgaacgagccgaacccgacctcctgcatcgactacgtcactgttgtcacctcaccgaccaccacgtcgcgaccgacccgggtctgttgctgtttgctagccggctctgcctggccgtgggctgtccctttacgggcaaccactcggagatcgatgatcgacccgaggacggcggtggcaagcgacgaagaatggactttagcggtcaagacgatgagagcgagaatcctgaggggtacatgaagctcgaagccgcgtggtcagcgctacgatcacatctcgacccgacatcctcggatcagaatcctctactcggaatccctggtctgggaggcggcgagcgggatggacagaacgctatcgccaccggaaggctggctgccgagatgatcctccgtggggccaggagtaagatgcaagcttcgtcgcaaggcggaccgggtggctcgcaagaccccgaggcggttcagctggcgttctggatcggttgccgacgacgcagcgggctcgtcatcgagcgaagcttggtcgaggtcatcaccatgaccttttgatcagacaggcagggcatcaaggggatccgtagatggtgggaaatatcatataatgcgagcattgggaccaggcagattcaaacaacaaggacaagcatagtttcaacacgttgtaacagactaacgacaatcatcaacaagcccgatacatcatgaatcttgaatgcttttcaaacccttgaacgttgtgggaatcagatattgggcgacaacgctagtgtgattgatcgtcaatgtccgcctgctctttctttacgtgaaagggttacaacggcctgacgatatgatggagccaggcatctccaaagatgcaccttgccgcggtctccatcacagcttgggatgtacagatgcatgatcgctcaacctaggtttacaaaggttgtgaatctccattgttgatcattggccatgagactactcctctttcactaacccacggcgagccaagtcttccttttcctgcgcccagacgggtcttgggacttcgtaaccgctacagagaccattcggtcagtcagacgatgagggcgtcatgtctttctccgctccgccaccgacctacctcgtgacccgaccgtacgaccatcctccgagcctggcgacgaccttgaatttctcgggcaaaatcttgatatccgggtcatcaggatctatgacgtgctccttgatatgaaacttgaggaccctggcaatgaagacgtgttgcgtcgtctgcccggcatcgttctcgatggtctgatggtgcatcagccgacattccatcgagaatgcagattcggcgacgtgcgggaccttgacgtggctgtggaaagagagcacgctcgtgagccatcacttgtgacgggggaatgattgctgacgcgcttaccgtgattcccgcttggtcagaccagtcaggggccattcggattgagcctcgggtgcatcgatcgacgcgtaattcgctgcctcgacgaagggttcggaaattaatgacacgcagaattctttgagctcgaggatgttctccgaggtgtccttgtgtcccgagggccggttacccttgacgatcgagatcatgatcgagggagggtccgaggcgacatggttgaaccaggagataggtgccagctagaaaatttcaggattcggattcagaccctgccctacgagtatcccttcgggcttgtctgtactcacgttggtactgccgtccttgcccatggtcgagacaaatgcgaccggtcggggggtgatcccccaagtcatcatcttgtacatggcggccttgttcaaatccttgccgggttcgatctctctgaacggactgtccgctgtgaaaccttggttttcgggctttgtcagtcgggtcatcgggatcggggtcagcttgaattcagactcgtggtgcgagtgagagcatctcacgatgtcttcttgtttctggccgggtttccagtccggctggggtgactttgtgtagctgaagctgcgtccggaggaaagggcgtaggtttagctggtagataccatcaatctcaggccgaggttgtcgactgacacggtgttgccatcgtagtcgggtcgactggcctgtacctctgtacttgacggaacggggtgggtcaatcgtatcatgtacccaggccgatcttccgcaccttacctgtgaatggtgcatgtttagtcatcttgctggctatgttatagtccaaactcgatttggttcgaggtgtaccggagacgacccttggactaattctggattatggaacgactagacgtcgatataagtagcaagtcccatctcggtagacggcagtggggagtggccgctcggcaacgattcggcgactgtcctcgaccttccttttgcatccgagcggggaagctaacttccgaaccgcatcaaccttttgccgagcatcaccggggtggtcgcgcgcgaagggcgggtcgacggttaaaagttgagctcgagaggtcgatttagttcgagatgcggaagtgacgaataatatgttcggggaaggggtgaaacgagcgaaccgaccgtcgtggtactctggtcactaatcgtactacctatcagctgaaccgatcgcctctggcctaccacgggcaatcgcgacaatcatagacctagaccgcgacaactagcggcatctacccgctaccggaatcgactggtttctttgatttttttcccccttgtaaatgatacacgaaaagcctttgaaagggtcgtatgacacgatatccatatggaccgaatcatcagagagccgaacgactttaattgctcgtttcgcttactttccgactcgatcaccgtccgtgcgatagcgcggtccaaaagagacgcaaagctttcaattgattcgttatcgcacgccattgtcgcggcatcatgacagtttgatggtcatactttcctcaggtaagaggaagcgctcagggaagtcggactttcctggctttggatagcgctcaagcatgaacagtacgtcgaccagccagtcgcaagcggtacaaagttcttctttgatcggtgcgcaacgttttataagtcagctctgaacgatgagaagagaggatagatcttgccgtcactcgtgtcatatccgggttgcacgaacttcactccaggggaagcatcccgtcgtcgcttcctggcgtctgaacggtttcacgactggtctggtctaaccatctcgactctggggcgtgtacaaaaatacacgtcgccctgggtttcgagtgattttaggtaataaaatgccgtcatttctctcgaaattgaaaccttcggaagctgaaaaagttgctcaggcaacgtcaaagaaagtggaggacacgggaggatcagatcaaggtcaagaaacgcacagaaacatatcggtaaaagtgtagacaagagtcgatctcgaaagtcgatcaatcaagccaggtgtcttacctcaaacctcggcataaatacatcgtcttatcccacaacgatgcccaaatcccgtacctcgagaggtatcaacctcttgcaaaacttgccccagctgcaaaacctaatcaagcgggacgccgcctcttaccaagccgagtttcagaaccagtacaaccactacctctccctcctccggatcttgcaacaatctcctctcgctttcgccaattcgacgtcagagtatgacgctgccggtgcttctagctcgaacggggccggcgggaacaacaatacggccggacagtcctttcgagagctcgtcacgtttgtcgcccaggtcgcacagtgttacccggaagagaccaagacgttccctcaggacctgagcgcgctcatcttggaggatggaagaggggcgagagggttggggaatgatacgagaaagacgatcgtccagaacttggtcatgctgcgtaacaaggacgtgatctcgtccatcgagtgagtcgcgaggtcgaccccacgtctttcccgatcgatcgactcatcggggatctgtatcgttcgtatgatcgcttcgcagactgctccaaaccctctttcctcttctcccgatgaccacctcgcccactctccgatcgttcatccggagacaaatcctcaccgacatcaagaccgccaacacgcccagcaagaaccacaagctcaaccgggtcgtccagacgctcttgttcggcatggtggaaaagggtatgggagccgatatcgtagggaacaagggtcgatacgccgcgggaagcgctgctgcccaagcccaagccaagggtggggaagctctctgggccgtgacgttgatcaaagagttgtggaggaaaaacatctggaacgacgccaagaccgtgtcgatcgtcgtccgggcgtgtcaacatcccaacgtcaaggttcagtccgccgccgtgcatttcttcctcggcgacgaagatggcgagggggcgcatgactcggacgaggatagcgatgacgaagggcccgacttgaaaaagttggctcatcagaggaccatcaagaaaaagaccaaggccgacgggaggaggatggatagggcgaggacggtcgtcaacaaggtgggtcttgagagggaatttcgacaatgtagacctggagctgatgagacgacgcgtgtttgcgaaccgaccttttcgtagaaacgcaaggacaaggcggcagggttgaacaacaaggtcaacttccccgctctcgagttgctgcatgacgcacagaggttcggagaggatctgtatgagaacatgcaaaagcacggcaagtctaggcgcgatggattgttgttcttcgtgttgcctaacctcgcgccgaattgcctttttcacagacaagatgtacacgctcgaacacaagatcacgatcatgcagctcttgtcgcgagtgatgggtgctcacaagctctgcgtactcgggttctacacctacatcatcaagtaccttacctaccaccaacttcaggtcacccagattctcgtctcgctcgctcaatccgtgcatgatctcaccccacccgacgtcctcgtcccgatcattcacaagctcgcccacgagtttgtccaccctggtgtcggagccgaggtcattgcggccggtatcaactcgatccgagaggtctcgcgacgacaaccctggtgcatggagggcgaggaggacttgttgagcgacctgatcgagtaccggaagagcaaggacaagggtgtgaccacggccgcgcgtggactattgcaactgttccgggaagtcaaccctggcctgttgaaacgccgagaacggggcaaggccgccaccctgggtctgctggacggccaggtgccagcgttcggacacggacaggacgccgcggacgggatcgacgggttggagctcttggatgagcatttcgcccaggcccgtgcggatcaagggttggaccctgatgcgcctgtcgatgagcaggagcaagaggccgaggacgctgcggcttggcaaaagtgggaagaggatgaagaggagggtgacggcgattcggacagttctggatgggaagaagtgtcgtccgacagcgacaatgacatttcgtttagcgatagcgacgatgatgacgaggaaaaggccaggcggaacgaaaagaaacgggacaagaagagcaagagcgaggcgaaaaaggccgatgctatcgaggtcgacgacgaggaagaggagcagcaagagatggtcgacgattccaaatcagtcgtctctgaagccgcaccttcggtcgctggaaccgaggccgagctcaagaagatgtctctgctcgcgcaacaaaaggcgagtcggtcgtgtgtgaccaggcgctacaacctgatcgctgaccttgttcttgccctgttccgattgcgactctggatagatcttgaccccggccgatttcgcgctgttgaacgatctccggatcaaagctgccaccaaggccgtcgagaatggaggcgggaccgcggtcaagcgtaagctcgccgcgctcgaggctgagaaaaagtctcgcaacaacgtgacgacgacccccgaggatgcctttttgacggaaaacgaaatcttgggaccgaggaaaaaggccaagatggattacgaggaacgaatggcgcacattcaaaagggacgcgaaggacgagaaaagtttggaagcaaaaaggggaaaaaggacaaggtggccccgagcagttcgaccaacagggaaaaggcaaggaacaagccgatcatgatggccgtgcattcgaacaaggtcatgcagaagaagaaggcttcgttgagggacgtccaggtgagtcgattccgggcgagagctcgagcgtggaataggtcgaggcgaggctgatactctgtgatgtgatccgtttcagatgaaattgcgggccgcggcggacaagcaaaagaaaaggaagagatagacgggggttgggtctctggtcgaccgtgtcatgatcacatctttagatgctggtgcgcgcgcgcgctggcttgtgtgtaccggtgtatcgttgtcaattcgatttgtcaatcatcgcttgttgtaacagtttatcctctacctctgtgtatgtgataccgatcgtcgcatggcccatgtttcattgcgggtgtcatcgtcgtcgtcgtcagagtagtcgtttcgtgtaagggtccgtgtacgaggtatcatgttgtagcggataaccgcggatcgctgattggatgagtttcgggtcatcgaccgggggacggctccaaatttgggacttcttttttgaatcgaacgagtcaagattcaccgatctctccctttttttcctttcatgctctcttttgcttccgttccaaaggagattgcggacttttcgggtcaaacaggggagccagccaggggtgcagaggcgattttccaataatctcgatcgagacacacacgctcctagcagctagcagctagagattacactcttggtagcgtttcgacatttcactcaaaggagatctattacatctcaagctaaactcctccaccaccctcaaacacacccctttaccgtcctaaagctctttccatagtgaaagttccctggacattcaaaacttcccgtgagtagcattggatgcacagtcgacaagctttggccagccagtcaccaccatcattacgacacaacctgtacatccgcctaccacgttgatgccaggtaggcggggtggtggtggtggtggtggtggttggaaaaaaacaggcgccgacctcgatggaaatcatcgcaaacaaaccgaggctgacgagatgattcccttgttccctctctctccttctctcgtttgactgccccgccccgccatgttcggctgcgtggtaccgttctcggatatccgctcttcgtcgcttttgcatcgccgcaccgtcctttataacccctggacgacgttttccgactgcccgtcatcttcacatccttcggctctttgactttcgaccctcaacctcgacatctggaacgatccgctgcttttgacgctgcgctatactcgatctcgttcatcctcatctcggctacgatccgcaacccacccccttcttccactgttccccgaccaccacgacacaccacagccgctcaatgccctctgtgctccgatctttgatccctaccgttcagaccgccgcccgatccagccttctccgtcagaccgcccgattcgcccgctccgccaccgctaccacttttactcaacaaaacaggatgtcgtcttccacctcggtccccgtccctacggactttaacaagtacctttacaccaccctcgccgaggccgaccccgaggtcgccaagatcgtcgaggatgagacttggaggcagttttccggactcgagttgatcgcttccgaggtgagtcgaggggcgtggcatgtgatgcactacgtgacgcgaggagtgcttcgagaaggctgactcgtggacccgtggctgctgctgctgcttccccccctgttctgacagaacttgacctcgttggctgtcatggaagccaacggatccatgctcaccaacaagtactcggaaggtctgcccggtgctcgatactacggaggaaacgagcacattgacattctcgaaaacctctgccgagagcgtgccctcaaggcgttcaacctcgaccccaagatctggggggtcaacgtccagccctactcgggatccaccgccaactttgccgcctttaccgccctgatcaaccctcaggacaggatcatgggtctcggtctccccgacggtggacatttgacccacgggtactacaccgccaagaagaagatcaccgcgtcttccatctacttccagtctttcccttaccgagtcgaccccaagaccggtttgatcgactacgagcagcttcaggtcaacgccggcctttacaagcccagactcgtcatctgtggtgcttcggcctacccccgagactgggactatgccaggctcaggaagatcgccgacgccaacgggtcgtacttgatgagcgacatggcccacatttccggactcgtcgccgccggtgagaacagctcgccgttcgacttttgcgacgtcgtcaccacgaccacccacaagaccctgcgtggacccagggctgggttgatctttttccgaaaggacaaggaggccgatatcgagcagagggtcaaccaggccgtcttccccgcttgtcagggaggtccccacaacaacgtgagtcgagcgggtcggcgatgctcgccgtaggttcgaattgaggggcgatagggaatgctgacccggaatgatcccttttcgcagaccattgccggtatcgccgtcgccctcaagcaggctgccgaccccgcgttcaagacctacgccaagcaggtcgtcgccaacgcccgggccatcgccaaggtcctttcgggccacgagtacaagctccagaccgacggtaccgacaatcacttggtcctctgggatctccgtcccctcggtctgaccggatccaaggtcgaaaagatctgtgacgagtgtcacattaccgtcaacaagaacgccgtctcgggagacacctcggcccaggtgcccggtggagtccgtgtcggtctggccgcgttgaccagccgatcgatgaccgaggagcacatggacgtcgtcgccgatttcctgcatcgagccgttcagatcgccctccaggcccaaaaggaggccggtaccaagctgttgaaggactttgtcgccgcctactctggaaacggagaggcctcgcagcagctggccgccttgaagaaggatgtcgtcgagtttgccaccaagttccccttgcccggtgtgcctgacactgtgagtaatctgtttcccgggccggagcattgagtatcgactgacgtctttgctttcgctttgttcaggccgctatcaagcgacccgctggatactaggcgtatcgagacccgtcccgccccctttctttccccttcaacgaggcttcaagtgctgaacctttgaacccgatcgtcggttccaaccttttcttgcccgaaccaatcacctcccatacaatcacatacactatcaaaagaatgtaatatcaccaaaatctcccccaccctcgctgttgtgacgtcgaccggaaggccaggatatcggtccggtccgaattggacacgggctgatacgcctggctggctgtcttttgttcttcaggagtttcaacacgatttatttgatgacatgacgagatgccacctgagactcatcacccgtggatgctttttatgattgttcgagtttttgcttccgatagttccggggttgttgacaaagtgtgtcaccgagacttgacgagatcaaggagagagtttggcttctcgacgtttgttcatcatcatacttgctatacttgactgcctgggtttgacggcgtcacgatcctcgttcaatgacgacggtgccatagcgatggttatcgccaatttgaatcccatacgtagctggctcaagagggagtatgcacgaccagtcgtcaacccggtaagctgcatatcgattcgatcaaccatctttatatgttaatatctcaactctggtcacgagtatgtaggaatggttgcaaggctgttgcaatgcgctctcagagaacgaccctggtatcaacactcgcgacctcatccatgccgtcaaccttcaactcctgctctcttcattgtcagactcgtgcctgccgcacacaggcctcccagatcccgatgccctggacgatctgcacggcgagatcctcttccagaaagatccctgtctcgtcatggtcatgagcatcatggaggtcggtcacagtgctttccagctacagacgacgatggagaacagaaaggaagcattgtccggcgtaagacggatcagacggataaggaacccccaggcggacggggtggaagaggacgaagctgaggaggacgatgatgacgaggcgattccaccgtacccgagagggttgctgcggctcgaactgagcgatgggttcaacacgttcaaggcaatggagtataaacggatcgacgggttgactctgggtgaaacagcactggggagcaaggtaggccagagatcggactgctccaaagcaaggaacggctcggctgaatctcgagctgcattgacagatggtgctcaaaggtgtacagatccgcagaggaattcgtgagatttacactcagtccttccacaagttcgatacgctgagacaaacatccttggcacagtcatgctgacgccgacaaataccgtgctgaagggtcacatggtagaggagatcgagatgcatcaagggagattgttccagaacgcgctactccgggcattagggtaagtggatgacattcactcgcatcagatctcgggcaggactgactgacttgaccgtcttagcaaacctgaactaccgctcgaagaagagacggtcgaggaagatccaaacgcctaccagcttcctccccttgctcatgcgcaggctggatttgcagatgacaggttctcggaatacgagggtgacatggagtacgatctgattgccagcgggatcgacttgtccgcacccggccctccaagcgcaaatactgtcagctcgagacccatacaggcagggcgcgggaacgaggaggatgacttttacccagaagacgacgatttcgaggcgttgatggtcatgcaagagcgagcccaagccagagcacaagcaccggcaggcctgtcgtcggcgtcgagcatcgcggctgttgtcaatccagaagaagagcttgaggaagattgggaggtcctggcagcgatggaagccgaagcagaggaaggcaacagggaattgttgcgcaacgaccaaggtccgaagcctcctgcacgactgaccttgggtctaccctttcataaggccgaggcgacctcttcatccagacaagcctcctccaccgcggatgacgagaaccctacgactcgttcccgcttctttggcaagaacgaaacggcagaattgagcaagagaatcgtgcctcgcaagtccaaacgggacactactgtatatttggacgaggagaaagaaatgttccctcctctggaatacgtctacgaccaggaggaggaggacggggattacgttccgggcggtaccagtcctccttcaaaacgaaaatacagagcaaaagggaaatcaaagcagccacagcgagcaggaaggggagaagcgaccgctttcgagaacgccatgaacgtcgacgatgatgaggacgatttcgaggactctcagaaggagaaccgaccgactgtggtgaagagaaactcgcaagaatcgactagccgagcctcggtaccgatggggaaaagaaaagtgcagaaatatgatccagatgatgacgttatcgagatctccgattgagcggtcacggaaggcaggacgacggggtttccgcgccatttggcctgtttcagctgttttgtttacggggtagcgtgtttcagccaaagaaaggggtctcgcgtgatgcctttcaaaggatgtgtctcctggatgacgctacgaggcgatcaaaggatgctgtttagcgggttgtaccatgtgtatatatgaaccgccgtgtggatgtgctccgtgtccacatgattaggaaatgagcccttgggttttccttggcaactaaacattccacttgatcaccatggtaccggaaggtaagttttcggtactgtccgctgaagctatacgagatcgatgcccaaccgaccttcaacttgccgcacagtctcgatgacacacgccgcaatggccgatacttttgccccacccattgatgtggtctcgaaaaagctcctgcatattcttggggtggaggccgagacaaaaggtgcgcatcaagcagaccaatgtgcctggaggtcatcagactgacccgtcaagcccccccctgccttgacagcttacgcagaaatcgccttgcaacaagccgaaaaactgctggcagctatcggagatcaacccgacgacacacctgcagagcggagcggcgagccgacattcaccacagaagacttgagagctactattgcatattggaaccagcagctggcaacaagacagccgagctagacaggagggggctttgtctgtggatgcgatgattattagcatagaggcagagagaacgagctcgggtcagttcctgtatgtatattgtgtacaactgtaggtttgtgctatcaagaccgcgatgtggccagtgcttcggcgttcttgtaatcagagatcttgtcctcgcaccattccatcatctcttctgccatctgaaaaacgtcgctggtaggcttattgtacatcattgcattgctaagaggaaacaagcgttagcctgcaggtcttgaacatgatatccgagcccgctctggcttaccaaaacatcaagtacacatcgcgttgaaagtcgtcaatgttcctgataacgccactcttgatgttggccttgatcaacttgagatccattggcttcttgactacatcatggtatcctggtgcatccgactgtatggacagattcagtataccggcatcaagttgaacgcccgacaatgccactcacaggcctgacggcggcgttgaagaccgggccgtgcttgtggcccaaaatttcttggtgaagctggttcatcttgtttctgaattgtctggtagtcgtttcggtcgtgattgcgttcgtgacagatcgtgttgttcgtaaggtcttggtttccggcagggctgtttcatcgtgggtgggtccgctttgatctgcaaaacagctcgttgccttagccattgtctgaacaaaatcgtgaaagatggcgtgattcacctttgttgccgcttcccctctctgccgctggttcaggactcggtcttggcaacggttgtttgcttgtcttgtcggcttcagcaacatcacgctcattcgacgagtcaaggggttcagcctcatcttcagcggcccttgagtcttcttgacgctgatctaggcaagacgtatgccaaacaaacagatttcaggggaaaggttccgcaatgagccgatgttcatgcaaggggacacgtctctccgacaacttaccgtcctttttgttcgtctcctccttgttggacttttttgtgctagccttttccttttcacgttgtcgacgatcgcttggtcgagcccgtttatccgagtcgaccgttgcagtagggctagcggtgtcctctggagcgctatcagcttcgtcctcatcctcgtcttcatcgtcgttttcgtcctcttctcgcaggtctggcatggctcttgtatgtcgcccactgcgtctgatagtggccggtccttcaggcttttcttcctcatcaccatcttcttcgggctcatccggctcatccttatctttgctagccctcgtccgattgcctcgagttctcgtttgtctctcaggagttggccgagaactcctctttgtcggtgcgctcggcggagaactcatctcgggcttgttggcgttggcatttctcgtgctgggccgcttggtaggttcctgtcgcctcgtcctcttcgcaccctgatcttgctcgccatcctcattcttcttcgcagcggcagtctcctcggtggtccgaattctaggacgacctcgcgcccgcttaggtttggcagttacctctacctcgctctgactttcttcctcggcttcagaagccttcgtgtcggtaccttgaactttcgcgaccggcgtactaggtacaggggacaactcgtctccacttcctctactagctgctcgtctccgcaaaggaagagaaccctcgcgggagtccttgttttgccctcgacgtgttgatggcgccgcattcgacttgcgagtcttctcgtctttgtctcggcgtcgtggtggcgtagaggtaggttcgagtccggtcacgggggattcatcttcaaccgggggcaggttgggtgacatcggcggcggcgtgagatcgtcctcggacgattggtccgagacgtgtttcctgggtgcgatctcgtctcgctcgggaacgaggcgattctcgtccccagccgtcgaggatggcaccacgtcggcatcgacatcaccttctttgtcatccacgataggctgaacagtctcggccttggtctcgagatcttcctcgatccttatgctgtcctgatcctctgcctttcgcttcttcgtccccgaatgtaccgtttggacgctcttctccctcggtcgttcggtcttgacctcggacgcggctggaggggtgctaggaacttcttgactgtcgggaacgacatcacttgtcgcgttctcttcagcgggtggcgacgttcccttccgtacattcctgcgtttcctaggcaccgggcgaccggaagacttcaagcctgatgtagccgctatcgacgtcggtgctacgtctttagacggcgtagtagcaggaggcgtagacacgggtaaagatatgggtggcgcgacttttgtcggaggtggtatgattggcagcgttaccggtgtcagtggcgccacgcgtactggcggtccttgagcttgcaacggtgcatcctccctgatgatctctgccgagaccgccgcgcccgttccttgaggttgaggggtcgagcgtgtcgaattgtttaggctcgggacaggtgtggaccgtttcgatggtccagccgagacgggttgagaagagggtgcgggtccgtccatgtcaacgtcgaccgacgcgggcggctcgggcgtgagtcttcgaagcggggcttgtgcttggatgggcgcgtcttctttggcaaactcgaccttggtatccgtggtcggtgggcttggggtcgattcgataggggccgcgggaacgggcacgggaataggggatggggtcggtgggagcggctttcgctgaccgagaggccgcgtcccctcggcggccagacggagatcatcttcagtcatcctccacagaagctcttcattctccttgaagagcgccatcccgcccgtcctcttcccattctcacccatctcaccgactttcatctcgacttccatctctgcatcccgcttgagctgatcgtccccatcagcagccggaacggtcgcatcgaggtccccctcttcgacctccatcgatccgtcacccttgtgcttggcggcacgtcgtcgatcgagcaagatatctcggagacggagcatgatgcccggattgtaaatggcttcaccggatttgatagcgttgatctcgaccgccagcgagctggtgatccgcgataaaggcatagaaatgtgaatgtacgtacaagggacgtttcaagttcagaaacgtatcaagaccgcgcgcatgtattgacagccgaccgggtaagacgtgaccaagggaaaggagataggggtaagccgtcaggcttccacagctagaagagaacggcatcgaagacgaaccgaaacttttcttctttctgctcaatctctgtccggatctcctgcatcctcagctcgtaataatgttgagcgaggtagaggtgtgcttcggctgtcgagttgacggggaataggcacggagaggctcgtcagcggggggagatgatgaacgagcacagcatgccggacggtttaccgtgaggttgcgattgctgagcaggtatgagtagcctgatttgatcaaaccagcattgggaggtcagcgaatgtgaaactgcgcgagcgggactgcacaccggtggaccgtactagtattgcacttacttgtcaaatccggtctcctgcatgagcgcgtcgtagatcttttgacaggcgacatcggaccagtaatcctctggacgattcaccacggggcactcccgtagcagagctcccacctggtcccatttcgaatcgcccgcaccgaccttgtggacggcctgagagaagaggagcttttcgcgtatcgtcaaggtcgatgttggcgcggtgagcgatggaccggacgaagcggtcgtcatcgcgaggccaagcggtggatgagtctatccgccggtactgaacaggtctgatgatcgcaatggtgagactctagagttctgtggcacttgaccgacaacatggtgtgctacacacggtccatgcctattctacctgcattcgaccgttcctttgatgcgaaggcccaggtcgggggaattacttgatagtgggatgaggttgtaacatggctagatgacgtgtcaaaacagtaatcattaatcatccccccccccttttgcctggcccggtgatgtgatgtgattgtgcggggaaacagctgccgctcgaggtcattgttgctggggggggggggggctttcccgcctttgacgtagatggacgcgataatgtcttcaggctcagggattcttcccgagggcggcaagttgcgttcatctacatggtaggcaacattgatccgaatgacatccgtcagatcagcctcatagccatacgtgtaagagcgggcgaggtcgaggacttgccagagatgtgcatgaaaccgtctgatcctcgagtggtagcttccacttcgacggtctgagccgacccggtctcgatcgcccgcttgatggaatcgtgcagaaaagtcctaccagtacccgaagagaggggtggggtggggtggggtgcggagggtcggggagcgagctcgggttaattttcggtccggatccccgacacagatcctctactctgtcatcccagtatcgcccgctcctcacctaaactcggtattctccttgaaatcgcccacccctgccgaggcgtcgttgggtaaccatccgatcacgccctttgaatgcggtattttcggtggtgtggcgaggtaagagagagctatccggcgtttgtcggcgaggtgatgaaagtagaggtgagggtgcgagtcgtccttggtcgccggggtgactgacgacgacgacggtgatgatgacgagtaggcacggtacgtcgatcgactcgaggcgagtagtcggattgtccgggtgggccgtgtgaatgctactagggtcatggttcaatgtatggggggtgtgaacgtggcttgtccgaggtcgagccttggtaaggatgtgcgtgaatatcggacgacgacggcgacgacgacgacgatgatgtgatgtagagtatagtatgtgctcgatgtcggtcgatccggggtgttcgggcgagtcgggcgagtcgcggacaaccgggagacatccacgttggacacaaggtcaaggtactaccacctacttgaatcctccccccaccttatatacacagggtaataccacccagacatcctatcacaccgcctcgatatcctcgccttgaccatgcatctcaatcctcctatcgtacctcgctccactaccacaatgacatcggccatcctcactcccgaccaccaagctccccgtaaagtctggctcgattgcgatccaggccacgacgatgccatcgccctcctcctcgccctctacctcgaccagattcagctcgtaggaataagctcggtgagtcattcgtcacactcgagatacatcggtggatctcctttcgctgatcaacaaatcggcttgggtctgtttgtcggcggcggttcaggtgaacggaaacgctcctctcgtctacacgcacgccaacgccgcacagctattggccctctatcgagcacccaaagatctccccttgcaccgtggcctgtaagctcccgagccactcccagagatcctctccacgaccccgacgctgatcaaccggctccggtcatcttctatcatcagtgctaaaccgctcaagaaggaggtaagtccatctccacctcgaacgcgtggagccccgcccaaacttcgcgtcaactccggataagcgctgaaaccgaaacaccttccccgacccctgctcatagtacatccatccacccgtcagtatccatggacattcaggcctggacggggtcctgcatatgcctcccctcgatcatccttccgtcgaacactggtacaaccaattcgaacccgccgatgccaaacagggggacgggaccgccgtccccgcgctcatccagtacctcgaacgattacccgagggagagaccatctccatcgtcatcaccggcccgtgtacgaacattgccgcggtccgacacttgagacccgagctgtacgatagcaaggtggacaaggtcgtcgtcatgggaggagcgttcgggatcccccagtggaccccgtacgcagagttcaacatcgccgtcgacccggacgcgttggacgagttgacgaaaagtgtcaaagtccccgtcgtcttggtcccgttgaacgtcacgcacaaggctatattcgatcaaaagactcatgcgaggttgttggacccgtgagtgcctcgcctcgccttcccagggaagagtgctggcctcgctgacaagacgatcccgaaaaacaaaccgtttgatccggcggctgtgggatagatccgtcacgaacttgaaggaggaggaagaactccccaagcccgtctcccaattgcgggaatcgttgagcaccatgttgacctttttcgtgagtccgagttcggcgcctgctggacaagggggcccgtggtcgtgaacgtgtggctgacgcctggtcggaccatgtcggggggttgtgaatgatagcgggatgcctacgccaacgagtttggattcacgaccggtccgcccttacacgacgccttgacgatcatccatctgacacacccacacctcctccgaggccgtcgagggaaactctcggtcgacgtgagcaagacggacaaggacggcgagacgacgtttgtcccgtcctcggaggacaaggtctcggacctcgagcccgcggggacagggaagggcgagagtcaggcggtcgagagtctagtattggaagacttggacgtagaggcctttttcgaggtctttctcgaggtcgtccaacgtgccgaagaggtcgtggccaaagtcgaaatgtaaacccaagcgcggcggggtttggcgacgacaccaagaaaaaacgcggtagacgcaccgcgcagaacgaacaagaagaaaaggtctcggtcgagccggacggaaaaggttgtattcatcgcatcggtccctttggaaggagctgcaccggcaggtccttttggcggacgagtctttcgaaacatgcatcaaacaatattcatcacattagcattgtctgtcgttcgaggggggattacatcgagatggaacgtctggtacgggaagtttgccgttcaggtccaccgtcgtcgtcatctcggcattcgagcgttttgacacttgatacccatcgtacaacaagggtgagacgagccaaggcggatccctcgctccagcagaaaatgtcggcgttttccgtggtatcgttgcgcatgagcgcgctctgccctacgacaaagcagagcttgctcgtcgatctcccagctcgagcttaagcgcttccttttcggaccgagaagcatctcttctatgatcctgcacctctgctctctccttctccgcttgagattctgatcgtgtcaatttccagtctattccactcgggaaaggtgtgacctgcacctgactgatcgcgagctcgataggttcaggttttcaccccgtgtgccacagtgccgaggccacgagtgcgctatatgactctcggcgctgcagcgaaagccaatccgagatgatcgtgctcatcgtcatcggagctcgggcctgaaaccagcgcgtgccaacgtcgtgccctctagcttgcaagagcaggccgatcacaagaaccttgtcccacaccacagccgggacagatgcgagttcatctactcatacatcccatctttcaatcactctgtaagcctttccccctgagctcctcgtgtgaactcggtcgactttcctaggtcgttcaaagatgtattttatttttagattctctccgcttcaaacctggatcggatcggtacaacgtgtataagagaggtcggaaagcggagagcggagagtgatcatcgccgacggagaaacaggagggaaatatgaggacgatacagtttaaatttagatcgagttcggaagaggctaaacggtccatccttttggcagcgagatagaagagaacggtcgactcggaatgactcgactcggctcgtatgtgttgcgtttaacaacaagggatggggaagacgcctgtggtcgggttcaaaaggggtaagactctcaccgagaaaggagtgccaggttggtacatctggtagacttacagaactgatgtgaatcgaacccgaacagacgacgaaacagaatatcggcggaccgtaagtcagactctgagcggcgcggtacgtgtggacaggaaggagtggactcacgttgcaagggatagggcaagggacgatccagcagaatcgacctgcaaacgtcacgagggttccgagggagatcagtatacaggacgctctcatgtattcgatcatgaccgggtaagagggatagggacagaggagtcgggactcaccggggcaaacgtcgttgaatccacctcctcggagtcggagcgcctcttcttcggccctctgcgattccgaggcttccaaggccgtagcagtgggttctatggaggatggacaacgtatcgaaagtcagacgcacggttccaagaggtaaagaaggtaggaaaggagaggacgaggttggactcacgcatcgaggacatggcgatgggaggctgggcggtggtcattctggcctgctgcttctgggcgacgccggtgtaggccgagatggcaggttgagtggtgtaaggggacatattgatgattgtcgaggtgtatgtttcgttctagtttggatcgtttgtgactgtgtttgcaagagaacgagtcgatggaaatgaatatgaagttgtgattgagagaagatgaaggttgggttgatcacgatgcgatcacggaatgtcgagcatttcctttgagaacgcacagcttttgatgtgacgtcaccgacaaagttgaccgagatgttatcaaataaatgggtgattcaggtgatgagtatgacgtgttattgtctattgccctatactggttgatgactaatcaacttctccccctgccatcgcgcgtgatcgccggcttattccattcaaactcgatagccgaacgtcgtcgaacagctcgaacacatacatcaaaccactagctagtctgcacacctactcctcctcctctctcgtcaaactccatcagaacgcacacaggctagttcatcatggcctcgcttttcatgaacccagcagaatgtggacccgccaacgacttaaagtcgctaggtggcaggctcgacgtcgacgctcgggcgagacgggtgagcacacgggtcgttaccatccgatcggatggcgttcgacgtgttcgctaattcgccttgattcgggacaggatgggttcgtttcaaacggccaatatggtactgcgggactctcgagacagacgcttcaggtcagctgcatttccagtcgcctctaaatactaggtcggacgagctgacaggctgcgtctcacctttgtccccggtgatcgcttcgatagccatttcaagcattacctcagtcttcgggattcagcatatcgtcgccctcccattcccgaaatcagcagcaacaataccaacaaccaccatcacagcccggtcctcgacatgtctcgcagccgcctccgccgtcgcaaggacaggcgcagcaccggccattcgcagggttcgagcacgcaaccccacgagcgtcgtcctcatcttcgaccgcctcctcggcatgggccaggtcattcaaccagcatccaccatcgcaagctacacctcgaggtcgatcccaggctgctagtacatgggtcaacgagcatctccagcagtcaagggaggtgccggaccagccatcaggtcaagcgctaactgcttcaggttcatatggccaacaaacggccgcctttttgggaactcgacgcacagcgcaattcccttcatatgcccacgctcaagctccggggttcatgcatcaaccgcacgagccggtcgggttcggccaacagggattcacgcaggaagtctttttcccgaacgagacgtatcatcatcaaacgcacgcctcgtcatcgtccagttcgttcttgtcaccggcgccaggaccgtccatgtcgactcgagttcccttgacgaccggacccgaccaggatttgtcaggtttgagggagacggcccgtcagatcctctctgatccgaaagtccaggaacagatgagcggggaccaggaccaccaggaaacggggatggataacccgtttgggacgtccgagtttttcaaattgatgcaggatctcgcccttgatcaaggagaagggctcaacggtcaaactcaaggtcagtcactgtcgaacggcaagcaggtcgttcgtgaggccgagagcgatatagacatggaacgcaaagtggatacggaaggccgctcggcctgtttctttggcgggttcgacgacccgcaagccgaactcgacgcggagctggaggctcaaccggggatccccgtcggacccgctttcgacctggatcgggcggtcccgacggtacatcagcccgtgttcgatcaggacggtcgttgggtgccttaccaccgagccaaggagtttaaagagaccgggatggacgtccctcggcatctcaaggaggcgctcgatctcgctcaaagaggcgtgacggccgagacggcgtatgcgcaggaaagggaggacgaagcgagggaggcagagccagagaacgggtttgacaacgatggcctattggagttttacggccagacgaggcggtccaagagggatccgttcgccgcagatctggccacgcgtgaacacgtcgaacgcgccaggaccggagggtacacggcgagggagtcgcaagaagcctggatggagagcgaggacgcgctcgatcgggtcttgggggatgagaaacaggaagaagcgaggaggcagggatattaccaggagcgaaagagaggagatgggataggtatggacggcaaatacctgtttgtcagcgacaacccgtacgtccaagaaggtcgaggtatggagtcgacggctcggacgagcgatccggcgggaatgatggagttgcagtaccaagtcagtcgttggcggtgtatgccacgcgtgtctggtacgccttgctgatgatcttttgggtccacttcagaacctcctcgaacacgaggcgcgggtcttggaggatccttcatcctcgcgcgcctggttcgacctggccatcaaacaacaagaactcgaacgcgacgaccaagccatacgagcgcttttgcagtgcatttcgctcgatccggagtgcaaggaagcctacctcgcgttgagcgtcagttataccaatgaggggatgatcaaagaaggtcattcagtcctcgaacgctgggtggaaggttcatccggtctgggcttggccaagagcaatggggacgacgcggatttaggaaggtttcaagctggatcagaagccaacaagagtcaacgacacgagcttctgacccgggagttgatgaggatggctcggatgatgccagagggggatatcgatgccgacgtacaggtcgccctaggggtcttgtttaacgcgagcgaagagtacgaaaaggcgcaagattgtttcagggctgctttgtttgcaagacaagacgtgagtcgcggacctgtgtctgctggtgcggcttcatagaggatgaaggctgatccggctgcggtcgagcgacaggattggatgttatataacaggctcggcgcgaccttggctaacgggggcaagtccgaagaggctctacaatactatgagcaagctctgaacctcaacccgggatacgtgcgagcaatgtgagttgtccgatgccgctcacgagtacgtttcgaggacctgacgaggttccgcgtttcgcaggttcaacgtcggaatttcgctcatcaaacttgcgcggtatcgtcaagccgcgcgatacattctcgacgcgatccggctgcaacacgccgacgccagctcgaatgtcaagtcgatgaagagcgtcacctcagacattctttggaacaccttgggcacaacctgcatgcagtaagaccaagttgcgcgaggtctcgagctttgcttttgctgacattgctcccttatattgttccgcccttagcctcgaacgtcatgaccttatggatgcttgcgcagcacgcgaattagacggtaagccgattcgccggtcattatactaggcaatgatgaaaaactaattcgtcatgctatgaatcgcaacgaatcagtgcttgatcaagaattccaggagtacgagtgactctcagtcgagtgatgtacgagtacacgacaggagattgttgtaagaccgtgactagttcatgcgcagcgatagcatcgggtccacaacaaatgacaaccatatgatgtcgtttatccgaaccctgtggctgccgtggatccatgccgagtaagcagcacgataaagccgcttgccttctcttgccactgcatatgaacggtcgactggtaaggtatcatcgatggtcgtcaagtcatgctgaaatgctcatttacgcgggtgtattgtatctaggtacatcgagcatgaaagtgtgccggatggcgttcagtttcgccgttgattagcgagcgaggccagggccttgtttttaagcccctcgacaaccttgtcggaaagggagactttagtcatcattttgacaaggctttcggggctgacaaggtcgtctgcactgggctgcagaagttgacgcaagatggcatctttgtcattgcaggaggcgaggcgtttcgacatgaccagtaggatggccaaagcggcccggagcaacaataacgggccctcaacgataaggatgtccatcaggcgcagcacggtgggaaacggcaaggctgacgcaaagattgacgggtaccaagagaccagcaaggcgccatacgctttatgaagcagtggttaggcttaatccacgcaagagcatgagtcatggcactcgactcacaggctgaatcgaaccctttcttgagcaggtcggcatgcaattgcggatcttgttgggctagtagttgtggtagaacgacggatgtgacgcggatggcgatcggcttgaattctcctgccaagtggtccaacagcgactcgtataaccagtacgcctgctcagtatcaaatgcctggcttgcgaagatggcggcgagccaagtggtatcaaaagccaaactgatcttggggtgtcggcatgcatagacatgtgacatttcctggataggaaaagtgccacttatgactgagcgatgggttccgaaatttctgtgacaagacgaacgtcaattcttgaacaacggtggggagcgaggcagaacacccacttgaaaagaggcaggtcctggtccttcctgacgggtacaaccacttgatcggcgatggcgcgatagctcatggaccttccatgaccagccgaagacggaggctgcaaccagttccaaacgcgatagcggagtgatgatggaatactctgctcccacactaattttcggatcttcttgactgatgcagggtacatgggcttggagatggtggcgagctgtagcgggaaagatgatcgatgaatacgaccgcgcggtgcagaacatatggccaagcacgcttactatattttgttccaatttggctgtcagtttgggatccgctcgtttcgttgcaaagatcgctggaactggactgttgccgacgaatccccattcatcgatctccgctgcttggtcttgttgccaatttcgagtgtcagttggttcattcatggtgaactgcgtgtcattgtatcgctctgtcttgaagtagtccttgctggatatcggagacgactctgacagactgccagctacagacagcttggatttggcattctgcgttccggtattgataggtattggcagcgggagcgaccctcgaagcgcggaggggtggtcagtcttctcgctcttcacggcagacaaaggtataggaggtgggtgagaaacgtctgtatcgactcgaagttgaggctgggaccttttcagtgacagactgcgtttcctgactgaattgcgcaaatgaagcaagggcgaaactgtctctcgcccgctgttgtactgctcgtccttattcgaggtctcgacatccacgccgtcataagcttgcatcatcgattgagtagaagggctttgatgaagagggagtggaacctccatcctagtgaagctggtaccgggcgcgttccgatcagactggggaaagaacggtgtgctcggaccgggatgtggatcctctttgtctgtttccgaccgaacagttggcgaagtaacagcgcgaccatgcctaggcgaagctgggttgtctccagcgtcgccgatgaagaatctgataggaatgggattcctggccttgctgagatcggtggacatttcgcctcgtagagtgaaagctcgccgcctgcgagcaattgctgtggctccgatgctcgtttcttcctctcttggttcagtataggtcggtcttgatggcgccttcttctgtcctgcgaggtgaccttcgtcattgcgctcaatatccccagtgtcaaagtcatggcgcacaccaggataaccgtggtaaacatgggactggccttgatggaatgacagatggggcgtcatcaaaacgggttcaatgtcagagttactggacaaacaagatagaagactcccgctcgcagacgatgggtccgttgctagcgttccatcttgactgtgtaggctgtctccgagatagccttcgtgactccggctgtcatgctgtggcgctaagccgatataagaagttgacgctagactgggcaatctcgccgaaggatctgcagcaaggtcgggactagattgtcgtgcgtagctaaggctttggctgcgcctagcaagcagctttttatgcggcacacggtcgttctggacgttggcgtcgtgaccttgttcggatctcgagctccccagcttgcctcgatactcgctgtaaatgtccgacagggtatggttggtactggttggctgagctgttggtgctaaggacgcgtccaatgtggtttggacattggcgggcgggaaagatgtacgttttgatgcaggagcatcggaacgcttcggtagtggctgtgactggctagtgaccatctctttcgtctttgcccgtttggctttcccagcctttcgttcgctctcgaccctacgtattggcggtttcgccggggcatcgagtggagtaggcgaaggagtgggcgatggggtgtcccatcctcttctgatgggtaaagaaacggcaggcgcgatttttagcttggcacgcaactgactagccagtccggtcgttgatgcggaccgcccgaatgtgccctgcgcttctctgctaggagccgttactatggtggtgtcttggtctggcccgctgcttccggagaggtaggaattgatcgagttcatcgaatttgaggtcgagaccgatgaactgtgtgtacccgaagaggacatcttcagatctggttcgctcagctcgactcgggattcccattcggcccgtcgatgatcgtcctcatcatcgtcatcgtgcatcattgcgaaccttgatggtatcgtcctagcttgactgcctgtagctagcattgtcggactcgcccgctcgagatcatccctctcatctacactggctgttgctgggctactacctctctctgaacccgaccagctgcttagtccagtgtccagggcgaaagggttggaagcgcggaacgacgcatgtgccttgaaatcgaacgaggcattggtctcggctgatgaagcgctcgtagacgatcccaaaggcctttccagctcgactctgttgatcttggcagacccagcttcatatgaccatcccgcatcggtctcccgtccgggatccgcctccaatgtcttggccgtcggcgtcgccacgtccgacccagacccctcccgatcgcccctagccgcctcgacgtagacatccatcgagctcctgctcgaagaagcttcccaacccgattccatgctcatatagctcgtctctccggtttgactgagcgagcgcacaggcgaagagatggatgagaagtccgtggtcccgcctgtcgagctcgccgttcccggttgactggcggtcaggctgacgtggcttcctgcttgcagcgaggagggtacgaggatcggatgaggggtgtggcgtgtatgttgcggatgagcatggaatataggggagaaggcttcgggtagcggcgaggtagaagaagcggttcgaaaggtgtctgccgtagtcggggtttcggtcccgttcggaaaggctcggtgatgcgaatgatgcgtaggtggtgaagacacggtctgggtcgactcctcggtgatggtccgctgtctcaaaggtccggcttgttgcgcgagatgctcatttcgaggggaaaccggcggttgaggcggtacgacgatcaccatgggaccagggccggccttgtttgcttgagccgattgcttgggcttcttgttgtgtggcacaaacaccggctttttgagttgtttttgcagaaagacgacatccgagtatttgaatcgaccaatgacaccttcgcaggctccctaccgaccggccgtgcaacttgttagcgtcgattcttcgaaaagagcccggacatccggaaatcggactcactagatagctttgatcttcttcgagaaccttgaggacgacaataatctcgtctttcataaacatcaagtcgcctttcacggtggccagaacatcgtgccgactgtcatgaatgtcaggtcaggaagttatcaaaatagcaggcgagatgagagactaacccctgagctttcccgatgccgcccttttccgcaaagcgtgtccacttgttcagagtaagagcgtccatgtcgctttgtgatctcgtcagcggattcctgactcgattcgagtgagctggtcgttgaatgatgaacaagatgatgatgccttttcgaatcaattcatgattgagacgagctgagtgcggttttcgatccgttagtcgtagctgctacctgagcgaggtatcttgccagtagacgtatgcctttggtcttgtctcgaaactatggttgattgtgggcgttgaaaaggttgttgtttacaagagtatgccggtatcgctgtctctgttacgctctgtcgtcaacttgcaactcgatgaactgatgttgatgatgatggtcgtcgtcgtccgttgtagcttctggctcgcttagggtcgttcgttgttgatgaagtcgcgcgatcgggcactatcagtcgagaacgccgaggtaagcggggagaggagggtcgatcagcggaaatggtgatggcgaacctccagaacgctaagtttctacgatattctttggtttgaacaacatacagagccaactgcttgaagggatcagaccaatcagacctagattcaggagctgccgtccgtgcaccacgttgctccctcgaaataaggacatttgttgacaaagtcatccctcatctctttgctgtttgtcaccgccgactcgatcttggaagcggtggtaaatttaaagccatcaacttgcccctcgccgtaccctcgtgtcaacgcgcaagatcatcggaagaatctaacaggcagttccgagatccgcagatacacgttgaatgatgggcgacgtgcttgtgattacagtttacagtttggtctataagccattaagtatcacgaatggcgaatgaggaggtgtggacggaattgacctcgatcggttctgacctgctccgaagcgcttcgcttgaaaatgatcacgtaggcccaatgagatcccaggcgacacttcggccaaccgatgaccccaaccacacattgcgtctcgcctctatagatctgtacgatgttagccgccaatatccgttagaaaccttgccctagaatttgagctggaaggctgccagaggctcattagaatagcgtttgaaacaacatagatgtgaagggtcaaacaccctacatctcggcaccgtcgctttcccccggactgcagcccatgatgccgacgctgctgctgtctaactcgatccttcgcatcagctctgcagttgctttatgcggcctgaaaagtggcggacttccagcaagcaatgcgcgacgtgcgatctcgacacccgttgcgacatcacttgatccgcctgctttaattccttctggcccgagtgcttctgcgattgtgccctgtgggggcgcctcccatcgatgcgatgttgcagcgagaccacttcgacagtatcttcgttgggactacagcgtcttgctcgggacgatcggatcgtacgtcattctagctttgattaggatgatttcggtttcacgtcgagagcgtttcgtcaagccttcctcggtcaacgatcctagacgcgccgacatgcgcggggaggtgtagaggtagatatcccttgtcactcgttcttcagaggtcatacataagatcgcctgctacgctggggtttaattgcaacgcctgacaaatggtcagctaggtaggtagtcctatcaagcgcgatcggaattatatcgagttgtcggtcttcaacggggtcgatagtgacgatcacattggcgttccccagatcgcatttatcgttaaatgtgcgaaacttcagtcactgttccccaacaaccgatcttgaagcatcgtctgcatgtaattgagttttgtgctatgtcgatccatcattcgatcgagcgtcagtccaccattagtcgcccgtccactcgagtgctgacctaacttcagtaccacatgatgttgagcgctggagcacaatgatcaataagggcgaggctctccaaatacttgcatgctaaggcctttgtgataatcccgagcgtctaagtatagtcatcatcttgtcggcacaatcgacttctctcctactgagacccttggccgggcttgaccaaagttaccgggaggattgtcgagggaagagcaggtcgtacgaaggtcatcgtctgtccattgtgttcctggtcgtgaacacctgaatcaacgcgctcaacagatagcgacgtagcattgaaacccgatgtttgaatactagtacgacgatgcgggatcaccacagcgctgatgccttttgttcagagcggtcgtcgctgaagcgaacgcagctctctgtgcgtgcatatacatacatgatataaagcggaacaaccgacaaatacgcaaacacgagggacaaccccctacatcactctccctacgatgccgatgattcgaagcactgcagacatgtcatacgctagccaaccttgatcctgctcttgctcgtagcaggtccttgaaatctatgcgacgaatcccgtacatccgcgtggacctgcttccctagattccgatcaccctagatcaagatgttttgggcgggctacaagcgggcgcgaatcacatcagcttttcgactcgcggcgccccggtgtcgagcgggattgacgacgtaccagctccttgacctccttgatgcactcgttcaggggggacaaccactcgtcaatctcctcctgtgtaggagcaggcttgggcgcctctcctgatttaggggcgggtcgtttacgaggggtcgagctgtgatgacgccaacgagcgggaaaatcagtctcggagacagaacgcaagatggagacgcgacgacggcctaccataagagaacgaccgaggtcgctcgtttcgtccctgcggcagctcccagctcctccctgacgatgaaaatcgaattggcatccgataccactttacgaatgagccagaaaaacccgatccgacttacttgctggtcacccaaacatactctacacccttgctctcttcggccaagaggggcatgtggcttaggacgtctacgggcgtaatgttaccggcgaggaccaagagcccctgttcacccttcctcaaggccttgacgacctccttgacacctcgacggagttgacgcgctttcgacgactttttggtggtcttcaggatcttcttgtgcagcttcttgggggccaagggggaggcgatgggagtgagggtagggggattggggtcgacagtctcatcctgcgacaatgacgatcgattcacatcagctctacgtagccgagacctagattggcggttttcgatcgaatagcaacgaggacgaacctcgtccttcttctccttcttgctcttcttcttctcgtcgccggcgacggtaacatcaccctcggtagccatggtcatgtctccagcatctacggtctcgtcacccttgctcttcttttccttcttctccttcttggccttcttcttggcgtgggcatcgtcgacctggtgaacgagtcggtttgaaaataggtcaaagttcaggtacgagcggtgggatcaaagatcaggttcgtcggttcgagttgatttgattgatatcaggaggagcatcagcgattgtagctattagatgggcttgggtatcagctcacatcggcaacgaccgccacggcactggcggtaccctcagcgggcgcatcgacgtccatagcgacggcctctgactttctcttcttcttgagggtaggatccttggccatttttgcgaggtatatgtaaatgtgggttgatttaggtatgagtaggtcgtttcagaaaggcttgacgatcattaccttatggggggatacctcccaacttgaaagctctattctattcacctcgcaagttgaaagttgggaagatccgatggttttgaaagacggacatgacgataacagcgcaatgtccgcttgactacacctcgttgatccgccttaaaatgaatgacactactgtcgactcgtgagaaagctcgacgcgtgaatcgacgcgtcagggtacgcgattacgagagttacgagatttaaccggttcaccaggggtccacgcttcgtcccaagccctggctgtagccctggttgctggcctggccccggggcacgcgcgacgccagcgacaacaaaacaacaaaccccccttgccccagcgacaccacctagtagggaccacctcgcaacctcattcccccattccataaccctccatcagtcaacgctaccgaagagtcaaacacccctcggtcgaacctccggcttcatcaaactcactctcgttcatactttcgttcactcttccgggactagtcatcgatcgaccggactacacttcggggccggggatttcattctctcgagactttaaacaaaaagggtaactcgcacatcaaacggctttcttctgatcaatcctcggatcgttaggtgagtgatcattggcaggcaagagcagcatcggaaatggggtgctgttccagctagagaaaactacgagagccagcgaagctgatcacaaagcaatctcatgcacttcatgctcttgttctgatcaaaaacattcccttgccgaccattctctgcttcagctaatctccatctactacaaccactaccaccaccaagaacaaccagttccgtcttatctacacaatgagagaagtcatctccgtacgtcggagctcgactgatcacgccacattccgggaacgagtggcggggtatgctgacaatcctttggtctttctctgcaactttattggcttggtcgcgtcaatagctccacgtcggtcaagccggtgagccaaattcatcagcgctttgaacctgcggaggaaatgacgtactgatctggagaaatgctgcaatcgaataggtgtccagatcggtaacgcctgttgggagctttacaccgtcgagcacggtcttagcgtgagttgacagtacccttgcggcgatggaattcctgtcgacatatcggaacgcgaattgactttgaacggacgtccactctcagcccgatggtcgattgaacgacccctcgggtaaccacgacgatggtttctcgacctttttcagcgagaccggtagcggcaagcacgttcccaggtcgctttacgtgagtgacatttgacgcatctgctgatcgaagccagctcgagttgaaactaaacgctttctcctcgcaggtcgacttggagcccaacgtcattgacgaggtcaggactggaaagtacaggtcgttgttccaccccgagaccctcgtcaacggaaaggaggatgccgccaacaactacgcccgtggtcactacaccatcggaaaggagctcattgacaacgtcatggaccgcgtccgacgtctcgccgataactgttccggtctccaaggattcttcgtcttccactctttcggaggtggtaccggatccggtttcggaagtttgttgttggagaggttgagcaccgattatggaaagaagagcaagctcgaattctcggtctaccccgctcccaagatgtccacctcggtcgtcgagccttacaactcggtcttgaccacccacaccaccttggagcactctgactgttcgttcatggtcgacaacgaggcgtgagtaggccgaacccgagcggtaaatcgaggcgggcatccgagctgacgtgcggtccgtggatggctttacagcatctacgacatttgccgaaagaacctcggaatccagtctcccggatacaccaacctcaacaggctgatcgcccaggtcgtctcttccatcaccgcttcgttgcgattcgatggatctctgaacgtcgacttgaacgagttccagaccaacttggttccgtgagtctgacgttcgcatggcggacttgagcgtctttgagccgtactgatggaattgtttggctcgatgccttgcagcttcccccgtatccatttccccctcgcctcttacgcccccattatcggagccgagaagggtgggtcttggcctcgtctctcacgatggcaacctgttgaaacccgactgacctggccgtcccgttcatccagccttccacgagtccaactcggtcgccgagatgaccaacgcctgtttcgaggcctcgtcgcagatggtcaagtgtgaccctcgtcagggtaaatacatggccacctgtctgctttaccgaggagactgtgtgccccgggacgtcaacgccgccgtcgtcaacgtcaagaccaagaggaccatccagttcgtcgactggtgtcctaccggtttcaagctcggtatttgcaacgagccccccgcgctcgttccgggtggagatctcgccaaggtctcgcgatcgctctgcatgttgtccaacaccaccgcgtgagtatgggacgaggctcaagagagtcgtatcgacaaaaatggatcggagcactgatgcttggcaacgcggccttgtgactttagcatcgccaccgcctggtcccgtctcgaccacaagttcgacttgctctactccaagcgtgcctttgtccactgggtgagtgaagtcatgatacgagacgatgcgctagacctacttgcttactcgcgggatgcctttgtagtatgttggtgagggtatggaggagggtgagatgtctgaggcccgtgaggacttggctgctttggagaaggtcagtggatggcatcatctcgccatgcgatcgaatgcaattcgctgatattcgccccgtctcgcgtttgttctcgcaaccgctataggactacgaggaggtcgctttggagaccaacgacggtgacgaggaggccgagtactaagcgcgacacgatcatctcaaaagtcgcctcgatattgtcatcccgacgaattcgaggtcgatacgaaaccccgtcacgcccctagtcacgaaatctacccctaatccccaatccccagcgtcagatgtgtgtaagagacagccctcctcctccccctcctcccggtaacgccggaggtagcaacactgccatctacgccgccgtcgccgtcatcggagccggtgccgcctactacttcctctcctcgtaagtcgcacgaccggcccccgatcccgctctcgtcctgatccccccgtccctgctcgctatacagctcccccgaggtccgtgcaaagaccaaggaggtcaccgccgaggcccgagccaaggctcacgagctcggacacgacgccaaggtcaaggccaacgagctcggacacgatgccaaagccgaggctcagaagttgtacggagatgccaagaacgccgcccataccgtttctggcgaggcttctggtgctgtccgtgacgctcagtccaagggttacgatgccatggccaaggctgagaacaaggccaacggtagcttgttgagccaggccgagaacaagggaaagagtctctggtccggtgctcaggccgaggtcgacaggttgagcggtcacgccaagggagacgcctccgagttgaaggaggtgagtctcatacgtcgacgaatagtcgggattactcgttgctgattaccatgttcctccttctgcagaacgtcaagtccatgttcaagtaaatcattctaaccttttacatataccctccatcatcaaggactagtcgtagtcccagaatcaatcccatgtatccatttgaaagtcgatcgaatcaaagctggccacgtcgacgagctgtaccgaacgaaataatgatgaattccgataaaaccgtcttcctcgggccccattgatggtccaaagccgtgccacttgtttcctcgttcatggtatagtataccaaagtctaaccggatggcaggagcaagcccgcccaaaactttcaccgacattttcgattccgcatgagcagcggataccatggtccagcatgtctcattcatctcgtaattagatacagttttcaatttttacgagcgtttttacgaggcatttcatccttctatcctagaattaatcgcggtacctcgaaagattcgagagcacctctcacggacagcttggggcaacaagaagcaagaaacgatggcctgactcgaaagggtcagccgtaggactcgtcgagcagagtggtcacggccgatacttacgggtagcagacaggacttggcaggcgctcagcgattatatcatggcctcatggattcgatcctatggtgaggtgcgtccgtcctctggatcctcgcgccccctccggtactctcaccctctcctcccagtccgggcgaatgacccacgggcgacacgccgttcctagcgggcccagatccgtcgttcagggtcatctcctgcatacccctctcgaccgcaggtgttgcgggtgactcgtacccgggcgtcccggcatcgtatggtgtgggcgggtgcgtggcgaagccgtccgagtcggtcgagatgtacgactctgactcgggcaagggtccgcgttcgggggcggcagggaaagctcccttggtcttggatcgcgcctgagagatgtgcgaggggacatagttgagcttgagattgtccgcaatgttatgctcggcggcgacgcttccgctgagccactatcgaggattgtcagctgcgtgcttcacggtaggagcagatctgggaaagacgggactgacgggatgttggaaagcggcgtccgccgtcaatctctgttccggatcgagcacgatcaactctttgataaagtcctttgctgtgatgtatattcggggtgttgcatcagctttgcacgcttcacaccgagatcaaagacacctccgactgaccttcctcgctgacattcttccagtacctttcgtggaactcgatcttgccccgcatggtctccttggcgacctcgttcgggtcgtccgatcggaacggttggtatccgcagagcaagacgtacgtgatcaccctgtcgatccacaccgatcagcgatcgtttcgaccgcctgaactggtagtgcactgatgatccgactcacccgagactccacatgtcgcaaggtttcccatgaggtttcccaacgatcacttccggtgcggcgtacccaaagcttcctgcagcggtatccaggtaatcatcatcatcgttcaaatgtctcgccctatcaaacgaacaaacgcctcgtcctgtaggtcagctaccgtcatgccagagaaaccgggcaggcggattaaagtcgacaaaacacttacacgccgaaatcagcaatgacgatcgaactgtggggttctctcgttctgtacaagatgttctcgggcttgagatcgcggtggacgatatcgtgcttatggaggtactggacggcggccaagatctcgctgaggtgggaggggatgatcggcgtgcatgatcagagaccgtggcagacaaagcgacgcgaatgggcattttggggggtttgcgtcagttccttgatttttcacgtctgctgtgcgagtagataaagccgagcatggactgacctgatgacctcgacggcgtctttctccgtaaatttgccctgggacgtaagcctctcgaatagttctccaccgacggcgagttcgaagaccaggtagaatctaggtacagtcggagaccgcagtgttggcgatcaagagtaatggatcacgtgaggatgaggagagtagaaagaggtacataatggatcaccaaaacgacctgaatcagtcctgacgaaccgcctgacgacccctccgattcgccccgtatccgactcacttgtccctgctctcgaaatagtcaaaacacttgaccacccccgggtgatccaatcccttcaagacctgaatctcatcaaagaccgacttttcttcccccttgacgagtttcttggggatgaccttgagcgcgacggagcgggtagggtctccgggaggaggagcgcggtgccatgtcgctcggactacctttccaaacgagcccgtacccagggtctgcgagatgatagaagtcagacgggcatgcagggagggttagacgagatgtagactcaccccttcgagggtatactccttcttcttggctgtccgggaggtggtcgaatgggttcagcagacaaaacgtgcatgagttcgggttggttcgggtctggccgatccgctgatatgacgtaccgaaagaaggcggttgcgagaggatgtggtcacgaatacccatgttgttgacgagacgatgataggctgtggggtagggagtggggttccgaggaagatatgatttggtggggtcagatatgtagagttcgagttcgatagtcaatggcctatccgttcccctctatctatccccctatccaagggtcgctgctccatggaatcgttcgctcactcggctaaattaaccgcgcggatacttttatttttagtcaatcacaagccacaaagtcaagccgataacgtgggcaaagggtagaggcagaggcagcaggcaaggggctgacgaattcaaagaatcccatcatcgcggatcgggtacctcgttcgttccttctcaccgacagcctctcgagagcgacaatcctcgtggcaatgatgacgattatggaacgttaacgtacaaacattcacccacccacccacacgatggaaccgatgaccaggggaggtggactacgtggagtgagacagccaaaacgacctcgctacacaacagtgaatgccttccggactgaggggccaaaggcgagccgccgcggggaaaggtgaccgagacggggcatagagtcggcgactacattttcgagtcctcactctcggctccgtgacatgaaggctcgacctcggcgtcgagtgtttcagcgagacgagtattttagctaagagcagctgttctggactgaagagggtttggagcgtaacaccgttcgtgttcagccgagacgaaccgaacgtcccaaaggcaaagggtctttgtcggattcacgcggctagaacccttgtacgcactttggagacccatcgcccttacgacaacattattattattgatccggctggtgactcggacaagaaaaggcatctcatggcatcggccagcgggaatgtaacattgccggccctgcttgggaatgaacatgatagcctcactctacttgtttgaccgcagactgttgtcggactcgtaagatccacagtgtatcgaagggattgacagaggactagtaattcgcaggtcgagcccggtaatccggtcggagctacgtgcgaacccgttgccggaaagtcggcaaagatatggattgcacttgtgtggacaacaggtcaccatcataccatgacagtgctctgatgttatctaccgtgcgggtagaggacggacacaactgctcctacgcccacacgaggctcgactgggagcaagtttgtgaggctccgatatgagcgtcattcaattcggcgtgcagaatctgagcgcgtttctagataggaacaattgggtcttggacactggtatgcgagtatgacagcaggtatagcagagtgactgagaccgttctccgagcatgtcgagcatgtgacatgaacgtgttgactctatagccatccttgcgacctggtgacggctgttcaaggtgcgtggcacgctaagcagctgccctcaagatactgtacacaggtttcggcaaggattgtggctgaccgaccgtcattgtgctctgcgctctggtatcctatatctgatccgcgactcgatccatacaagcacgctaacgtcgagactataacatgtagtaaacgcgtttcatggctggactggaatgattccggtttgggtaatatatctcgtcagcctttttacgcggcgggatggaatggtcaattggttgatcgatgttcccgctcccgcgcgaaatgatcgctgtcgagccaatcgacgacgacatcgttcgccacgttaatctggctcgattgtcgaacgagattgtacacgatcatcaatcatcaacctcgtcgtgtattgttccactcgagactgcttgggtggctggcgatattttgaccaagacgaaatcgacctgcatatggtctcgcatctcttggtttgcatccgccctcaccaaaggttttccgcgcggacaagtcaggagattgccgaacttgcaaaatcgagcgaacaccctcactttcgaccgtggtgatctcgacatacgacgatcaggactcgatcgaccgtcgacatagctacatatagatagcctgaggtttcaactcgagctagtctagggcgaaaacgacgggttcgagctcatccgatctaccgggggctcttttcctgccctctcgaatcaagttcttcttccgtaaagtcgcatcggtcggatcacgacgcgacgaggaaaagggcaagtcggaggaaggtatcatcatgccagacaacttgcctgtcgaccgacccatcgacaatcataccgacaccgacgtcaacattcgcctcgacatagctaccgtagataacgaggttgttcgggagcccgctggaaattccgactcgcgatcgctgtcggttccagcaagggtcgacatggacaccgagatggaggttgacggggcgtcgtcagggtcgaacaagggaagggtagtcggatctttgccgcctccgaccaagacacccgatacgacaccagtggctgggcctacgtccgtgtcgcttccaccgtcgacaccgatgcctcctgtgctgccgccgccgctgcccgagatgatcttaccgacgccatcgacctcgacgctcaaaccaacgggttctacctcggcttcgctttccacctcgatcgatccaccgcttcctatcgatcatcgccttacagaaccaatcgatgccttttacaagctccagtttctggatccgatcgataccatgcacgaccatgcttcaggcactgggtcactcgcggtcagggatggcttctcgtattacatgcagactctggacgtgacgattgggagaagggtaccgaagcgggatcgagaaaagggaaagggcaaggaccccgacaaggcagagaagccaggctctcccgtcgaggatgtggtcaagcgggaagtcgcggcctcgatcgaacctgcaacgccttcaaagatcccgttcccggtcgatgacccgctcgagaatgacggctcgctcgatgcaaaattcggacaacagctcgaagacctcgtccgtctaggcctggtcgaccctacgttctctgatgagcctgaagtagaagtcaagcaagagttaggagaaggagagtcgtcatccgcagttccacttgacaccctcgaacatgatgtcaagcaggaactattcgaggatgccccggcactaccgatcaccgggccttcgccgttagtcatgcctcagacacccgagccgaatgctgcagataaacaggatggtgtggacgacccatcgactacggctgagggtcaggtggatgtggatctcggagccctgaagagcgtcagtagactccacgcacgaatagggcaagtactaggcggtctcttgcaggcatggaacggattttttactgatcacggttccacatctcagatattcgtatacactggctcaattctacctcgaggtcttgggaaggaacggtgcttgggtggatgacgtctttgctatgagggggacgagaatcgcactcgggccctagtcagttcaaatctggtctctcccgactggtatcgttcgctgacacgttgcctcctctgcagtaccaagatccagatctccacgcggactttctacttcatacttcccccgcagtcggtcgctgcttaccctatccctcctggcatgggcggaccacctttccctggctcgacaacgtccgcctccccttccatttcccacaccatccctcttcatgcctcgacatcacaagctcatcagcagacaccaaacaaggaacgtgaaagagacctacacaacctcttccgaatgcctgccgcctttaacgctttctcgctggacgctggaccttccgagcaacacgggtctttagccttgggcaagaagggtctcatgcagcagtgggaggctgagaggagaggcctctttggtatggagagggacgggaaacgaggatggagactcagtcgaacgcgaagacgaaggctggaagctatcgaagccgagccggatccagaagtcaggctagtactgtttgccgaagaagaacgacgaatggcgaaacgacgcaaggggcgcaaacaccggagggaattcgaagacggaggcgaagaatttcgtcgtgacgaggagaggaggcttgcccgagccatggggtccgatttcggggaggataatgatgaagggttttcgtcatcatggtcatcatcggcgagatcgtggtctcactgcagttcctgtagcgggagctacgacgacgacgattggtcctccttctcggaagacgacgaggaggcgatgagacgggaactggaggacagcgatttgagtgacgagagtgacgagagcgatgacgatagtagcgaggaagaggctttggcagccaagatggaacttgatggggatccaaccaaagaggtcagcgatagcgggagcgagatcatcgccgcaagcgattatgaaccggaaaagccggcatcaaccttgcaggctcccttggtcatgcctattccccagatgatgcaacctccgctcatgatggagccacctcagtcattccacttgggccctcctattccaccaccgttcgcaccgatgctaccgccccacatgatgcctcacatgatgccgaatatgatgcccggcatgttgcccgacatggtgcccaacatgatacccgaaatgggacctttcatcggacagatgcatgatcaacacatggcgccaaatctgacacccatgtccatacagccgccaccccctcctccagtacctctaccaatggacaactcccctcaactcgccttgattgcccctgccaaacagccaacaccgaagcccgctccgacgccaaaaccggctcctgcaccgcggcagccatcagcacctgtactggctcccggacccgcgcctccgcccggaactgcttcggcaaagcctgtatcagtgacggcagtcaaagcgaccgcatcaggagcggcgtcatcgtcatcgacaacagctgcacccgcgcctacccccgcggcaccgccgaagaaaaagtctgggacaaagaagccacccgggcctccagtgtttttcggacctttgaatgaagccgatatgatcgccaaggaagcggcgatcgctgctcagaaggaagccaccaagatcgccagaagggcggctgatgctgagcgcaagagggtcgcggctgctgccaaacgtgagagggataggcaagcggccgcggccgccaaagccgcaatgccggatccacctgctgcgcctattgtagcagtgtcaacccccgctgtgaaaccggcgaagaaacagaaggcggatgatagtatcaaccctgtccctgctgcggcagccactgttcctgttcaaaggcctccccctttgctgccaaccgccacacctggctcgtccgggcctaccgtacctcctatacctatccgtccaggcccgccctcggccctgtcgggacctcggccgcagcccatgcctttagcgatgcgaccgcctgcccccggaccgccccggccgcctggaccttctgcgccagctggtcctcctaaaccgccctcgaccgcgatcaggaagttaagcactcccggccaagccccaactttgcaagcgcaaccgagcagacctcctttgtcgccggcggttccaccaggtgtgcggccagcagtgccatctcaatctggctcattacccgcgcctgtgcctttgccctcagcaaaagctatggcatcgcctgcagtccgaccacccgcaacaccaccggtcccctcgattgtgtcagcgcatccgcccatcgagtccacgcccaccgtaggtcctcaaccggctgggtcagcttctgcagtcgctgcggctgcagcactcaacaaggcgcccagactggcaccagagccgatattagggatcgacggacaaccgttcattggacctgagcctctcaagccggatctcacttatgccaccataatatatcgcgcattggccaatattaagggagggagagggactctgggtcaggtttgtgattgggtagctggcgaatgggagtggttcaggttgaatcccgaacagagttggcaggtatgtccaagaagtgaacatcggctaggagatgtgccaagactgatttcgcgagctatttagaactctattcgtcacaatctctctctgaacaaagccttcctcaaggtgcctagaattgagacagatgatcctgagtcgaagggctctgtctggattctagatcccgtacacgctcctgaatacgcggaaaaggagaggaaggcgcaagagctcaaagaggccaaagctaaacgggattcagaaaaggctgtgatgcccgaccggccggttccgcctccggttccgagcaaacctgctgccttggtcaagccgaagaagccgctgacgccagtctccgagaagcctcctcaagtcgcttccagtccgagcggtactgttcctggcaacgcagtcaggcccgctccaggaacgacgacaggtcctcgaccggctactcccgccaatgtagctccggggctggcgagacctggccctctgtctgttaacggatctcccagaccagttctgcctgtcggcacttccgtgaggcccgttgcttccatgccgaacattcaaggcgtgtctcgtccacccacagcgggggcagtcccgaggcctggggctccccccgttcgcccaggtgttcccactggagtcaatcctcgacccgggcctggacagcccaacgctagaccgagcccagtgcgacctggaggtgcttctggggcggtgcgtccggcgatggcggcactgcctcctggcgctcggccgccagtgagaccgtcaccagctggacaagttggccaacctggtgcacccggcgtcagaccgcctgcgactggtcaagttccacgaccgattcctccaacgaggcctccaggagccgctcgacctccggcggcaacagcggcacgacctatgcctcctgggacgagaccccctccgaatgcggccagaccccctgctgctccccgacctcctttaggagctcggccccccgctgccagaccaccgacaggagctatgaggccagcaccgaccggcgcagtagctagacctcctactactagaccggctccaggtgtaccgcctaagcccgctgcgatcggcagcgtgagacctcccgttgtcactaccgcttcgggacaggggtctttggggaagcttccgactgcaccagccaatgcaggtggatctctcgggtcgctgaacattcctgccaacaagcagtttccaatcgtggtcaagcctataccggctcatctacggaacagcaatctgaattcgcattcgcatatcctcgatgggccgccacttgttgttgatgaggggacgatcatcttgaacccttcgatattctctcacctcactcccgaccagttgaagcacttgcaatccttgggagctcaacaaacgctacaaatcttgcaggcgtacatcgttcagcacttgcgagaaaagttgcgtcagcaggggactaacggtgtcaaaggtgccagtggcgccggaactggtgtcaaaacggggtccactcctgtcaaacctgcgacttcggcatccgctgctgcgacgggcgcaacggctgccgctgccaagcctagtggacccgctccgaccggcccgaaacctgctgtcaaggccaattcgacacctgtcaaggctcctccgaaacaggctcctggaaaggcgcctttacctgccaatgtcgccaataacccggcgattgcagcgctcctttcatccgctcagcagttggccgccaagtcaggttcgacccccgcttcgaggtccggttcgcctgcggcccagcctccagctgaaacggttcgagtcatcgcccaattggccgcgacggctggaaatccgagtagcgcttctaccccactgacaccgaacgctgtcgcgctgttgcaatatttgcgacaggttggagcaggagcgaatatgacgacagctgcgcatatcctggcgacgggagtgatcccagctggggccatcccagccaagactaccgcttccgcaaacacgacacctcgtccggccccagcaaaaccggtggcgacgcagtctccaactgcgaatcccacgcacgttgcatctactgccattccatcaaagtccggcccgcctgggacgatcacatctcccgctccagcagctgcttcgccggctcccaatacgactttgacgccccatgcattgcttgcagccttgaacggtgtcgcgcgtccgtcgccgccgatcgcgtcccccggtgcaatcgccagtccgcccgtaccaaacacaaacggtacggcgacagcagcgaaggccgcgccgacgtccacacctcctccacctggtccttcggttttgggtaaacgacctctggacgataatccatcttcgccggtcagcgatccaaaacggcaaaaggtctgatccgtacctgatggctttcgtccgccatatttttcaacttcgtttttcgctacttcattggatccatcatacgcgtaccctgccgcatgtttcggtacggcgcaatctctgcacttctaggtcacgttcgggttgcaacgtcctgttgtcattctcgatccgcattggcgattcgacatgggttcatgatgtgaatcgacctcagcgttttcaacttaatgccggaccgtctggttgtatgataatgacaaacaccatgtaccaagatgatcagcatctacagcattttcacgttcttacctggtagatttggttccgaatgcggatcctgattccgtcccaaaccggacgcttcgctgtctaagagccgagctacatcaagaggttcacgatggatgatcaagatcaaacctagagccgttttgctaggcaatatcgcgaccgtatatctcgctcgacagtttcccttcactctctatcgcacatcatgtctctccctcaagtgccagtttatgacaagtcggaccctcgagcgggcgagccgtaagttacagcgaagcgatcctacattcgctggcttaccggactggtctggatgcgtgatatcagccctatcgtccccttccatgttcctcgtcactgggaggagacttcggactactttggtaccatcgctaccactctgggaggtttggccatggtgggaaagcagcccatggcggcctggctcgcaatcgctgcttcgatgctgggagtcatgaacgctcgtccactaacggagaagaaggacaagaacggtcagggaacgagcagctcgccatggggatctttggcgtgagtcggactatctgaagtccatacagtcggcgcggctaacctgtcaaacgaaacgggcctcctccacagtatgggtgtggccggtctgcttggaacctatgttccccgtgttatgctgccaccccagtctcccgcatccaggcagtaaataatcagcgtgtcagccagtctcctcggaacgtgctggaatatcttggttgtaacgtaaatcacacaagggcatgtcgcatggtttgacctggacacaagcgcaatcactcggccggatcgggctcccgaccgctcgaaagctgcaccgcacggtctattggttgcgtccgtattacaattggttggaattgtcccgttcccactcttccgcctcgagaaccatcctctctcttttcctcagttcctcctcatctctctccagcgaatcctgttctccatcaaacacatattccacgctgagtacagcatgtgacagatccccaacagtccgaggagaaatgatgcttgatttgcgaccgtagaccggccaagtccagcgggatccaggacctttggccatcgtgatgtgtggcagcgattgaagtttggtgattgaggccacggttggctgtgtgtccagcgggacatggggaatattggtgtgtggctgtcaccaacgcaaagacagatcagatcaagctgcggtcccgtcgaggcagtctactcacctcgtaaaccccgtaggcttgcccgggaacataccgcctcgcccgctctcgtttccgtttcagcgtctcctttggcgtttccacagtcacgctccccgcgtcgatctggctgaggacagcgacattgagcgtgtcgtcctgctctgccgatgcgctgccaagagcaagacgctggcgcaaatccggatcatgctggcagagctcctcgacttttgcaaaggcgggtgccttgtatgccatcttcgcctcttcgatgtggcggtgcccattagcatcgacgataggatcgtgaccatactgcccatgccaagcaaacatatgtctaacctctcccaattccatcatgcgttgttttcggttttcccgtagatctgcctcccactcgcgagccgtgatggccattttccacatccaattgtccggtccgatttcgttgttcgccagcttcgtccgcttgtgattcgcggcagcgctcgtccaagggtcgatacctgcctctccccaatgcgtcgtaggcgctccaggtgcataaaagggagcaccggcgatacgatcatctcccctcgccggacgatcggcagcggtttcgcgatgtcgtaccgggacatagctaccagggtcgataccgtcttgtagacatcgctcggctgcggcgtcttcgtagtaatcgtcgatgacatgacgtccgtctgtaaatgtaggggatttcgaatgagccactggatgcaagactatcacttgtcaaactcttacttttgatgatggcggctcccatgtacttgtagatattccttgcagcatatatcgtgaccggtctatcgttacggaagttggaaccgcttccaacaccggtctcgagcagtaggaccttttccgaatccgacagataagtcttgacgagcgaatggtatcgtcgagcgagtagtgacgagtctgtatggcctgcggcttttgcgacgtcgattcccaacatgtagagcttttccgtgtttgaccgttcgggtagagtaaaagtcgtgacccggtattctcgttccgctgcgaagcgattctaggtcaatacaacaacacgtaaggggatactgtttcaaaactcacaccctagcagtcttccgttcgcatcgaccttggtctctcccttttcgtcatcctccatagctacctcgtcgtctacaatctcgtgcaacacaccccgcaccttgtgcatcttgacgcctgtcgagtagtagcacatgagacgagattcagagcgcacgagttccggctgatgactgctcacgcttagagctaccggacatgaacctctggtccccgccttcctctgccgtatcttcgtcttccgtattcgcccggctctgccgagctggtcttgtgcctcctcgaccacgacctcgacctcttggccgacctcgacctcttccggaccggatagatcgagctttctgtctccgtggcgttcccgtttgctcgggtttctcatcgtcgtcttctccttgctcttcatcgtctgcaagctcgatatcatcagcaagcgaatgtcaatcctgggcaagtgtaagactgaccgttagcatcctccatgaccacatcatcgtctccctctgcatcttcgtcttctagctgctgaacctcgattggatccgaattcttgacgtctccatcggacgagtgttccgagggctcgggatcatcagcgcccacagggacttctgcgtaggatacgcttttggcgagtgctcgtcgccgaggggtcgaactggatgttggttctgggatggatcgcctgatggcagcctgtgccgtcgtagccgccgacctgcgcgttcgagtcgagtagctcatgaccgctatactacagtcaatttaattgatctttcagactgatgccgtcgcggcttggctaaaagggaagagggtcaagcagaatcaaaagatgaatctggtcaaaggtcaccaccgttgatggttgtgtcgcgcgaatatggccctcatgtcgctcaagacgcgtcaaccgaacaagcaaattcaaagcaatcaggtcgaatcgtatcttatcgtaacgacggcgatcaagctttaacccagaacatgatgatgagataacacgactttgtctagttacagttccaatcccattgataacagcatggaagaagaaaagagcgagcccggtaggaaatcagcagacatccccggaacaaaaaaagtcactcgaggagaaaaaatatggggggatgggggaaacacaaggatatccgggattaaaggctggggagtcggtagaggaaacagagatgtgatccgagacatgtttgctggccgctctctctcctctgcacggcaacgatcttgtatatttgttcaggactcgacgcttaagcggcggcctgctgaggaggcaggtccgctgccacgggtccctcggcaccctcggcgttgatatctcccaggttgtggaagtctgcgcaagagatgaaagccgagtcagtctcgttccgaagtctgtctttatgcacaactcgaatcgttctcgactcacccaagatctcgctgtacatcatcaccttccaagtgtcgacggggaggtcggcgtcgttgaaactccagtcgaacacctcggcggcaacaggctcgtcggtagggtcgtggtagggagctaggtactcgtgggcgagaccgtcggtggcggtgatacgtttgcgagggtcaaagaccaacatcttctccagcaggtcaagagctacaatatggatcgtcgtcagcgtgaagttccagggctaagggacgcttgcgaagctcacccaggggatcggcgttggcaaacttcttgctgaagggcactcgttctcgcttgggcaagctctgaacgaatcgaagggtctataatatagtgcgaaaagcgattgttagcggctgtacatctggatacatcgctcatctccaatgctcacgttctcactggcgatggtctggatgacatcgtcaggaggggttccgaggagctcagtaatgatcgagaattggttgacatctgcgcacgaatcgctcgagtcagctatttgcatcgtccagctcccaagcgggtccaggacttacggtcctttccggggaacaagggctttccctccaacatttcggcaaagatgcatcccgtgctccagatgtcgacggcgacgtcgtacttttgccaggtcaacatgatctcgggcgctcggtagtaacgcgtcgatacgtaaccggtcatctgagggtcctgaatacgggccaatccaaagtcacaaatctggcgggaatgccgatggttagtagtcattcaagttggggcaaggacatggcgccaagggctccggtctggcttaccttcaagtcacagttctcgttgaccaagatgttggaaggcttcaagtctcggtggacaacacctgccgagtgaacgtacttcaatcctcgctgcaaagtgaatgccgaaaggaggtcagtccggtcatcctcgaacgatcgaacgatcctcaaatggcctaccaagatctggtacaaaaagtattggatgaattgcttctccagcggccgcgaggtcaagagacggtgcaagtcggttcccaaaagctcggtaacaaagtagctgttcgcgatacgcaacgttcgaaaagattagcaataagcggggcaggcacgttgaaatcgctgcactcacatgtcctccaagggcgagatgaagatgtcgctcagagagatgatctaaggcgaaaagggcataataacaagaagtcagtcggtcgcattcggtgttatcatataatggtaggccgctcgagtcttcgaacaatcgccacacaacagatagcgttccaaacgggcctcgctcgaaccccctgcgtccgtcctagcgtcgcccgcatcatctccgcatctcccgcccgctacgccaactcgagctctggatggtacccttgaatctgatcctcgagcgcgaaacattggcgactcacgttctcgtgcctcaaatgcttcaacaacttcaactctcggtaagtcctcttgctcagaactggggtcgagaagggcttcatgatcttcttgatggcgaccgcggttcctccgagctggtccttggcggaactgtcgggtcgaggtgatgttgataacaaggggaagaagggtagtcagaggggacaccgatggagataattggcgatgaacagatggacgatgatcgagcgaatcgtcgttcgattgatcacgaaggtgatgaagagagatgtagcacgtcagtcagcaacatgtcatcgaacgttgttgagaccggcctctatcagcgaaacgtgacccgttgtcgccatctgatacggtacgtctgcctacgagaccctcggacggctgccctgacttgaaaagcgactggtgctgctacactgtggctcgaaaggctcggcgtcgatgctccccgacgaaagccttatcaatccctggtcgcacgtccgagtagaatcgcctccgacgtcgcaaatccagacctcgccgccccacttttcttctccctttccatgcctttcctacgctcgttcgatgcgtataacacccagatggaccgtactgatgacaaccactgcgatcgagcaaaatcccgagacccgaaactcaccagaccagaccgaaagcacccatcccgaccggttgaaggtcgacataacgggtggtaacctcaaagacctgtcgagttccgaaaatcgacgtccgaatcagatagtgacacacagcgagggttcctctaggttatcagctggttctctcggtataacgatattcaacatcaaggaggaggtgagacgtacggttccgaagatggagagtttgacgaaatcggccattttggatgtctacgtcgatgtcgttcgaaaggtaggtatttgatgaaggaatggaagaagcgaaaaacgtgaattgatgtctagctatctagtatctagccggatcgtatgtgcttgtatgcttgtacggtagagtcgagggccgagttgcgtgataggtgtgtctgattgggtctgtttgcccaggaggaatgcggtggtgtgggtgacgaggcgtgcgagagggtggagggatgaagagaggacgagactgagcgagacgtgctatagttccctgattagaacgacgtcgagatgtgaagatggtctgtaaagatggtgacttgctctcgagaaggattgaaaggggatgatggtagatggtaagtggtaggaggtgatggtggtggtggtggtggtggtggtggtgggtgcgatgtggcgtctcctgggtcgcggtcgatcgggttccggtcgaaaaagcggcaacgaaggggaaaggggacaaggcagacaaggcagggcaacaacgcgaagagagggacacacacacacacagccaacaacgacgaccaacagaaagcaaagtggggggcaccggttcaaacgaccggtacgtctcgactggtcgggaatcaacctggctgcacccaagacccgcaaactctggtgagcagcagcacgtacaacggagactgcagcgttaggaggagcgagcgagcgagcgagcgagccgccatggcaggtcgacaagaggtgcgtcctgcttgcgtgggcgaaatcatggacacgcgggggcaaagggagactctctctctctctctcgttaacctacggccgctcgaccacggtaggattatgacgacaagaaaacgccacgggattaggacaatcctttctctctctctctctctccccaagcagccacgacttcatcccgtcaggcgatcgagagagtcgccaccccgaggtatcgttatcgtcaatagtgtcatatcggtcgatgcgaggacaatgcacttttacgtgagacctcgctcatcattagccgatcagccggggcgaaaacaaagaaaaaaccgctcatcaagtcatcacggctcacggaagtcgcggcctctttgcacgacctccgctcgtgatgacactttcgatcaggggatgactggaatccctcatccttttggcacttgtacccctttcacacggcgctatcgttcagacggtctcgaggccctttctacgggtcgggcctggctgtgagccacgttgaggcggcgtggtcaggatggcaacaaaaccgaaacaaaaggctccgcgatctctcccacttcgcctcgcatggtgactgcgcagattcagccctgagaggggggggggggggtattattattattattatttcattattagcaacacttggcgaacatccgggcgactccactggcgactcggcaaggcgggacatctgtcaagaatccaatccagagggagacttggaatcgccgttttcaaggccagaccagaagactatcaaccttaacgatgtgttgccacagggtaccttcggcccttgcggaaaccggggggccagcaccagcaccagcacctcgctgacctcaacgctgaggtgctggtcaccctcgtggaattcaattgagccgacatttgatggtcactatggcgacggaacgtcgggtcctcaaaccgagtactagtcaatatcaagctttccctcctctgactccgaaacttcttttggggcgcacttgacctcctcctgatccgaggggttatgcccagcatcataatcagatcagacacatcaatcaacagtccaacaccggttgtcgttcatccaataggctctcgcctatcaaatactgttgctcacagtgccccccgatctcaccggcaagtatcatgagaagttcaaccccggcaaggctgaagccgcctactcgatttaccattccgcacgttgggtgctggttctaggcgttgatgaggtccgaatcggaaccgtcttggatgtagccttcttggaaacgttttccggaggtgaggaatgaccatagggtatagctagatagattgatgacagatgcggaaccactacaatacaacagagagacctatttcccaaacatgccttcttgatactcctccgataggttgctccgaggtggtgctctgagagcggttaccgatccggttatctgcccacaatacggtggtcagtacttatgggtgatcgatggtgaagacattggaatgaagggaaaggtcaaccagtcggacctcataaagacgttgcggaggtactgaaggtaccatagcatgtgaggacttggcatctatacatacaaagatcactcatcctcgcagagccttgaccgctcgagcagcaggtatctggcagtatttcaatacagccgcaatatcacgcactccaaaatcagctacggtgtccccaatcttgatggtctttgctggaggtctcccagaaagacgaacgaaaggtgtctcgagaaaggcaaggagcgtgcttctgagtttcttggcggtagcattgtcctgcttcttagccatttcaatggcgaagcagctgagcaccggataccacggggggagggtctcgttggacccgtctgcatgctcttgcttaagcgccttgtagcatcggggaatatcttcgagtagccacccgtgccccccgatacataccgatgtctcaagggtatagacacagtgcttgaccccaggcgccatcacaactgagtaaccaggtggaaggacgacgatctgcaccttgtcacccagggtcctcatgaaccagaccttctcgcccttatgtaccacaaagtgggtggccgatcccgctgcgtcgtgatgttcgcaagtgaaggaatccttcccgttcacaatagcccaacaagatgcattgcgaaagtagtcttcgatctggtcggtggtggcagggtgtcacgggagggctagcggcgtaaacgaaaggcaaagtacggcacaatagggtactttactgtgaagaatcgtttgtgagagtagctaacggtcaggatagtgacctttactcttgtatgattgttaaatatcgaagagatctgatgtcgatgtttgggtcctattgagtactgaagcgtctcataagaggtacgctacgttacagaaggctaaatactcgcgccgaagcgtacggaaacggactctaaacccctaatcttgcgcttctacccgttcgcttcttacttgtctactttcttctctcttgcccgctttgaagtccctttcctcgctgcgtgtacagatttgtactttcttgtactgtaaagtctgactcccaaagtgacgcgtacgtaacggctgttgggcttcttgacaatctctgccaaaggcaagactcgcgtcgggcccgatgtcgatcgtctcgtgacatcttggaagtcttactcacggaaatggtttctctcgccgacataggcatgaaattgagccatttccgagatagcaacacccctcgagtcaacgtgacgaccggcgattttcagaggttgcgtggtggcataacggaagcaacgctccaggcgctttacaaggcaatcaagactggtttgggtactggaaacgcatcttccgagaacatcccggacgaatcgacagatgaacccttgccaaccaagaccatggtcgaacacgcagcagcggatgaatcactcgattctggcgtgctccggtcgcccgaggtagctgccgatgcggatctagacgagttggcagaatgggagcctgatcaaagcactggcatctcttctaccgaccctcctcagagtgtctcgatcttgagggaaaggcctgatgggaagcttgagggcgaacctcgactgaacgaaacaatctggagagactttttccatcccatccgcggtttcagacttcagtctcggcactggtccaacggaaacactccgagacccatggaaacatgttgtgtcttccaaaagactggcaaggaaagggccccgtataacaaggtctgggtggaccgtatctggccggtctctcccaatgactgtgtcgtctctatctggcaactccagatcctattctcatagcttgcgcgacctatccctcgggctgcatgttgcgtagaacttcaaagtggtacatccccttcaaacgatggttcagtggtgtcgtggctgatgatccttttactacacaatacaggtgacgtcgactcgtacgagctcctccactatgtcacccaacgatacttctttgcagagaaggcagactacagttcgaggatgtccacgaggaatcaattttggcattggctcaaaggacagatcccaaacggttgcaaacatgaggtgcgacgccgtcaatgggttcgaatgttggttcaaccccggttcaacccccagcgcatcctcttaatgagagtttggagtccctctacaaagatgggaaggtatatcagagaagcattgacgtcataaaggagcatgtcaaattccttgctgactggaaccgtcctgatgcaagggacaactcgggaaccgcccggggcaagctccctcttagtacgtacgcgcaggaccatccatgttacggcggagcttcgctaagtcgcgtctaatgaatatctgagtgcaatgtcggtacggatcgtaggtagtcacaacaggagtgaagccgagtttggctaatgggagcgaattcggttgggatgatacgaatccgggttgatgtacggataaggaagtaatgtcgctataggtagctaggattgaaagcttgttcagtacgaacggtgagacgtctactacttagcgagtgtcctgggttgtaacctcttcacaatacgtctcgaagatgcggtgctgtcgcaaatcagtaggcgtaaatagaatgcaatattggaacttgacctttctagtacaagaacgtcgtctgccggttctggtcaagttctactaagtatatatacaaaaacgagagtaatccttgcgagttgagaacagtaggcaacccaagagcgggtaaggtgaatccgggacaaagagccaaattgagggttgagagtcggtcatctaacaaagatgaatcgttgtctgctgagtcgagatgtctttgttcggtgtagttggttgtcgaactatgaggtctttgttcgatatccgtcgatgccgctattgttctccgctggtggtgatatcgaatatgcgttgtgtcgatcgcagagagggtgacgagaccgcgcgagccgaagtcggccgcgtaagaaccggatccgcgtcgcttcccgtaacaatccagcattcaggatggcccaggccaggttcacaagctttgattacacaacaaacgctcgccagttgatcacagtgatgcaaggttacacggcccttgccgttcgatccgacgaccccaacattgaggatgttgaagtcgttatgctgggacctggaaattccgtcttgatcctccctggtcgtgaggtgtattgggaagcggtgaccgatttcatcttactggagaacctcgaatgggtcatgggcagcctgctgtgcgctgaacgactacagcaatttgcatcccaacaagtggggccaggaatattttacggaaaggcttatgcggtgccttgagcatggtctgcaacagggcttctttcaatcatagaaagagttttcacgatcatcttctggcttcagggtagacaatgtttataattacgcttccatggcagggatctgttctgtagcgtatatgacatctttcgcaatctctggatcatcgaagggtcctgcggagtacatagtgcctgttgtactcgtcactgcgggtcgggtccacaagttgtcctcgacaaacggcaatgaaggacaattccatccagctatcaaaatgatcgggactattggaaaccggcggttaaaaaggtctgacaaccatagccatcagaacgatcccaatccgggggttgagaatagactctgccataggccgtaggcttcgaagccagggggaacatctataaatgattggttgagagaatacaccccgcccggatgcatgggatatgacctcacaaagctggcctggtaaacctgaaacactgagcaagcgcacgacccttcgccgggactggtcatcgcaaccggtcaccacgaccgagactggaggcgggatacactattcgaagcaattgcattgcgtacatctaatagttggtattattttgcatctacaggccatcggcgcttcagcgcgatgtgacactccttcgtctcgactgtgcactatcgtcaatatctttcagtcattactgatgcaaaggattgccattagcctacttcctacagaatgatcgcaaccgaggcgactcactcatgaccaccagcgctgtccagccggtgaacgggtgactagcaaatggaacaaagatcagccggcgctcggtacagctgtgaaagatcgtctcgtccccaagctcaccttcgccttccctccccgttcttggcatcatattgctcccatagataccccgtgcgcttccactcctgatgatgaagcaataggatatcgatgtgagacgagcaagtgtcacaacgacggcgaaagaaccccaccttgaatacattatccacgacgtttgcacgtagctccctgtagatctcgatcgctagctcttggtatggacccgattccttggtgtacttgtcggatagcgctttcaacgccagccaattcatctggatccagatgggacccttccagtaattttcgcccagaccaaagtaaggatcggccatggacaacgatcgaaggccgtaaggggaccagaggtgatctggggaacgtatcaagtcgaggatatccttcaggtgtggcgagtcggatggaatgtgctgcaggaagaacgggaacaaggtcacatagcctttgtgacagacatgcaccgactcgtctgaaatgaggatcaggatgagtcaggttgtcatctgtccttcggggagagttcaatcgaacgcaccgtcttcgtctaccgtcacgtcacagtatgccttttcttcctcgctccaatgcagctcgtcgagattggccaacacgcctcgttcatgcttttgatactccctgagatcgtctccttcgcccagataatcggctacctctcccatagtccttgcaaagaacccaacccagctcattagatcgacatgaagctctcccgagtgaggtggcttggcgcgcggatagtcgtccaagccgctcgtgagcacgtgttcttctgtacgtccccgccatctgtacgcttccgtcctggacttgggtttccggttccactcccttagttgacccttttgcgtgcgacggaaccataaatagtgacgacgaagagcaggatagatcgatcgcaagtaggtctcggcgagatctggattgtctaggtgagcgtcagagatgtcgccctgggccgagcctcccgctgagacgccgtcaaagcccagctgactttcgagcatgttggcgtcggtacgggctttcagcttggcaatgtatttggtgagagccaaaaccaaggtgggaggattggcgtatgaggggtattgagtttggaattcggttggtacctgatcatgactcaaagttaggcctggcagactcccgtgccatgggctgtggaaccacatgagggactgactttactcctggcctcggctccgagaatctgttcgcgagcgacccagccgtcctcatcgaccaagtcgaaccaacttttaacaatgtcaagactagtgggatgtgatgaatgcgagtgtcggttagctgctgccaatccatataccggcgagtggacgcacgcgagatcgttatcccaatcggcgatgatagcgagatgaaatccctcgtcccagtaaaatccacgggggaagaagcttcgactcggcgtcgcggtaaagagctcggtcggaccgaccatgaccggtcccttgggcttgaccgtgatctgtcgctcgtcttctccgtcgtcttcgtcctcgtcctcgtcttcgtcatcctcctcttcgtcgtcgtgagactgcttgaacgaccggtccacgatcgattctccctgaaagtagccaatccctccgatcatactggacgtcatatcctgagcgaaacgaacgtactcgtcgttcgaatattcctcgggaaggtcaaaagccgaggcaaatcgacgatcgtaggaggcggattcggcggcgaaagctcgactcagagtgtcgtctgtttgtgccgacagacgggtagtctcgactgagcatgattgccgccatacgatacccgggatttgcctgtactcacagtcccagtcgagcgagctgtccagcttttcatagaaaacgtcgaatccccagggtccaccgccggacacgtcggcaccgacgccgaccttttgaaacgcaaacacgttggaagccggtctgacgatattgttcaacctgaatagatacgccgggtcggggggcgactcaggcacgtaattctgcatgatcgtaccagccttgctgacgatggcctgattcaccaagtctgcgggcgatgtcggctcagaaatggggctgaaggctcgatctttacgactctgactcacccttgaccctccaaacgtcaccgtcggggatagcagcacctgcgaacgacgtcttggtcgtggtgtccacaaaatcggcatgatgttgacctcggagatcacgagcagagtcgggatctagggaacgagtcgtgtggttcagctagacggcacgaggtacgttcgccccgagcctgagctggacgacgcccggcttcactcacgatcaacgatcctgatcctgaattgccccagatccgccgactttccgatcaagacgatgtcgccctcgattccctgtgaacaattcgagctcggtcaggccgggcgtctaccgcatgatgcgtgcgtgggcgattattcacctcatcatcggcatcactctcgagtcgtaattcgcccaatccctcgagaccaaagtgataaatcaggctcgtcctcgagaccttgcctgtcatacggtcgtcgtcccgtttagcgtatgaagttgggcgaaaccatgttcgagcacgactcactcggatcgataggcttgccctcgactctgactgcccattcgtcgcctcgttcggacctgataaatttggtagtgatcttcacgttgatcttgccgtcgacgaggtcctgagaagcgtaacgccgaccatcgtgctgggtgaatgcgtatgacgagagtccgtccgattgttcgcaggtgtgtctgatctcttgatgtcgtccggggaaggcagaagaatcgcacgagtagaggagtcgggcacaaaaacgaccgggtcggtcagcatgctgacgactgcgcgattctacagtcgagatgaccgactatagactcacctttatgtgaagggtaatcgttgagaccgtgccacatgagaccggtcatgagacttttgggtagacgagctcgaatcccatggtataactgcggtcgataggttccccatagcaagctttcctaaagatcccatggaggtcgtcgattcgacgagagagcaacatgccgtgtcgtcaatgtcggttagctctcgatgcgatgtatcgaaggctatgtgatgtctattgaactcacgttggctgtcttttgcaagtcggctgcgtccaagaggtcagctgaggatgccgctgatgtcgtagttgacaagcatgagagcaagattgttacggcgaggacgagccaagtggtcgtagataaacgtatggcaccactgccatgtcccgtcgtcgttgtcgtcgtcgtcatcgacatcatggccgtccgaggttgtttccaattcgaaacgaccggtaaggactcgaacagcagagaaatctagagagagacgagaccctgggtatgttgtcgacgtcgtcgtcgtcgtcgtcgtcgtcgtcgtcgtcgtcgtcgtcgtcgtcgtcgttgagttagagattagggtagttgatccatgcaagtcacgtcgtccaagcaagttcttggctcgtaccggtcccttagcttggtatcaacttgaccttgttcgactcgagagacacacatattcaatcgatcaagtcgacaagagggtcagactagactcttatcctctctcactggtctctctctctctctctctctgttcacacttgccgacatacaagagctacaactttccaggcgggtccaccatcatccaccaccaccaccatgtcatcacacgaacgacaccccccaaacgtcacgatcgaatggtcaatcgccgacatggacatatcgaccggacattcatcgtcgtcctcaaccctcaaacaacatggttctacctcgtacctactcgtcgtcgtggactctcagtctgatcccgtcgtcgaccaacacccatcggagatacccaaggtctacaacgagtctgacagtccccactataccgctctcctcgcctcactcgcccaagctaaagacggtctcaacgccagactgactgaatggaaggagatcgtcggcgatacagaaaagtccaaagaggtcttgcctcctggaacagcaggtcaaaagggcatgggcaaggccatgatgatggtacaggccgccaagcaggtcgatggaagagcgtcatcagggtcgaggacgccgacgacgaccatggtcggtacatctccccggacccaggtcaaggcgcccatcgtcggtctgcctaccgacgaccaagagtcggacgaggatgacgacgaggtcgatatagacgccgtcgtcgggtgatgtctctctgtctccacggctggcgatgtggcacgttcccccaaaacacaggtcaaggacgatcgatggaattataaacgtcttgtgctttcacactacaactcatggcactatcatctcaaggaccatccacggcaaactcttcggatagacgaagaacactaaacgccgccgactcgttgatctcgacatagatcgcaactctgtctgccgggttgtagaccaccgcctcttgatggaccctacaggttggacacccccggaactcccttgcatacgtacttgtcgggctccagccgcatcgaccagacaccatgtaaaacgtagtccttttcactgatgtaacgaacgatgacgaccgtcgatcagcatggccatcgcaaccccgcaatgtccttgccagtccgtgactcacacgatcggaacaccccggtccttgtagggtttccaccagactttatccccctcgcaactgatcaggtacgtcttacccccgggttccacgttcaaccgtttcgaagaatgcatctcgactgtcccgcccgccgcagtcacgacgtccttgatgaccttgaatgaatccttcaaactcgccgtctataggtaggaaggtcaaccacgatgtaagccgagtgagacgtgcgatcggatggaagactcgcaaacatcccctttccccgagccacgtacgagaatgatccggtgtccgttcatcagaccaccctgtgctttggcgtctttggccctttgcaaggcttctgcaagcttgaatccgtgcctcttttcattctcgacatcttgcaaccgatggtccacatcgtctgcaacggcgacccgggttcagtatgtcgatcggaacgcacgtctttgaccccgcatagactcaccgaccaaagcgtccgccttgacacaggcttccacccacgaactcgtcaccacgatcggcgcctgattcatggccaacaagaactttgaagtccgcttcaagccgtccgcaatcaaatgctacatggcaagcctcgagactgagcgtgggccgaggtgccgtcctctcacaagcacaactcacagtgacctttttggcatccgcagtaatgaccactccgtgctttttgaagaactgtatgaaagcacgctactttgagcctcgtcgcttcgactcaacacgcagcacatctcgtcaccttttgttgaagcggctccagcgtgatcccggtcgtcgccacgaagatgtcggaaccatcaacgaccggcttgacatcctcgtcatcctctccatcactagccgtcacttggcgcaccacctcgcgagcccgctcattcttggttcgactcggcccccctacaggcttgacatcttcctcgtcttcaccctcctccacttcggcctcggtttccgtacctagcctgcttgaacgccgtcttctacgtctggcagcggtatcactcgcgtctccctcgtcgaccactctcgccgcctttctctcggacggagggatgatgtctttacgtttcttttccttggtataaaggttcatgtcctcagccatggcatgtacggcatcctctgccttggtcgcagctcgtcgcctcgccctgcctgtagagatctcgaccggatcctgagcagtggtctctgttcgtcttcgtttcttgacaggagccataggttgatcatcatcgacgtcgccatgtccatctatgccttgagtctgctttgcattccgcttgacggacgcctttcgcgcatcgggactggcagatctggacgactcagcagcggtttgcctcgatgggccagctttgggagtatcttggtccatcatagcaacgaccgagtcgccgcgtttactgctgacatcatcgtcgcgaccaccatgcccttgttcgtcatcgtcgtcggttgctgcggatgtgggagttcgaggtctggccgtggcgtgaggcgctggctgcgtgggatcgcccatctgtatgtcctgctcgacggcacccatctcttcctcttccccccaagccaaagcttttctagtccatggtactaggctgtcttccgagagatgggtctggccgaggaggctcatgtagttgacaccaggcgggaaatcggtataacgacgatggccctcgccaaggtgttcccagcgaacaaagcagtcttcaagccaaaagtgattgaccgtgttgatcccccaatgctgagctcgctcgactttgtcgctatgaatgctgtcgtggcaaggccagtacgctaggtcagctgacggtattcgagcacgcagaatctcgcattccctcacttggcagccacgaggtgagtgttttccgttcgagccatgtcgttggtccaggacccccccatcgcggtgatgagctttttcagatactctcgcgaatcacccgtgtaattggtcaaggcgattttctacggcggcgggacgagtcagctgacgttggggtcgacatgaacggccggcaatgtgcactcgccagacgagagaaccccgggacgccgttgcgcggtaccgggtagtgtaggagcgcgtccaaaggcgatgccaatcgaccgacccgcaggatgtagtagaaccacaatagagtcccgaccgtctttcccaacttggtcgcctatgatcaccaagcatatgataggcatcagtgacagcagcgaagtatattggatagagacccggcgacttgcactccagtatcctggaccctccctccacctagtaatgtacacgtcgcagtccgccaaaccctcctcacccgcgatgggggttccaccagccatgatgatccattgatctagagcctccttggtacgcgggttgatgtcgagttcgatgcccagcaagacttttttaccggcaaacactccagtcttttgcacagcatcagcgtcttgctcagcctcgaagatctcgtcaatgtttggtctcgaggtccagatgatggttcgctgatggtcgtcctggtcgatataggctcgtttgattttgctaccggggacctcgtcaatggaagctgttcggatgggcggcaaggtggtagccgacgtaaactcaaaggcttccgtgggaactagacgacgcagcttgatgcattcttgtatcctgtgggtgaagaggacctcgtcgtcagatcttgtacgtgctcgtcgtcgtcgtctaaacgagccgacgcgggactgaccattcgggcaggacgatcttgatacccaaacccgtctcggagatcgccttgaactgtgtgggcgtaggttggacgcagatcatgtgggtaatttctttggtcgcgaagcgacgatgttgaccgccaaacgtgttgacggcgccgtagatggcttcgatgtcgcccgggggaaactgttgggtagggaagcttcgatcagaccggaatcatgcaagattgctttcaacctatattctactcaccccttccgcgcagttgatgatgatgcccgagaagatgagcttgggatcaggcgagtagtgctgtggtctagcagctgatagagtgagacggaccgtccataaggcgactgacgaacactcacgactgcagaccgacaatgacgctccttgacacccattcaggctgccaaaacggcggggcaatggtgcgggggttacgtagcagtcagctgtctttacgaaacgccgaaccctaaagacatcgactcaccttgacgatccaaaggttgtcccccaacctgtttttccatcgcggtgtattctcgatatgacgtatctcgatcgtgttccaagatcgagttatgatgtgggtacaggcgtcaatgtcgaatctgggctgagcccgatgtgcagtgacagacggctcgtcgacctggtgttcatctatcccgttgttcgtgctgtccatccgttcggccgtgtcgctgttgaccggattcgtggcatcatgcggagcttcatacccggtctcgtagacctctaccgctttggcacctccatctttgagaagcgtgccaagtcgttgtcggtggtccggcgcgatgctgtcatcgagccagtagatgatgttgccaaaacagtgagcgttagctgtcgaggctatcggtgccgggatgttcagattctccggtacgaccggatcaatttccattgcggtcatcggagcagatcttgggcgatggacccctggctattgataccggtggtagtgtctggcggggtaccgtatgttgcgatgtcgacgatgagaatgatcgactgaccgtctcgatcgtcacgagaatggatggcccactctacctgtgagcgattgtcgccgatgacctgctcggtctttggactgctgtattgatttatgatcgaaccgacagagaacccaagccgtacgaaaagtgtgaccagtagctagcagtagagtgcctgcctggtttcttcaccaacgggatatgcgcagcgacatgaccgtgatcggtcagagccgccatgaaccacaacttttgggttttcgctaaaaagaaaaggaagaaaagctagaagttagtaagttttctgggaaaagtatacttgttcttgttctgaccagaattctaatgcagtgtgatatctgttggtggatacatgtgcaatatttgacgatttccccccaaggctgttgagagctagtcttacctttgagatgtgtccaaccccatgttcggtgggacgttgctgtggacaaaaggcctgtgagacattggcaggtgccatcttgtcaagtattatgagagtgccattttatccgcaatgtcgctcaagagagacaagaccttgtccactgtcttcactctgtgaagccatgctgccagatacgtcttcaaggtggccttttgcaaccttgagatcacacaaaggttgagcagaagggcagtcgtacaggaagatgacaaggggtgtgcatatgaggcgaacagaaataggtcttacagctccgcagtcacccttgtttttgtcctccttttccatggtttccctttttttctctcccttttgtctttctcctttgcattttcctatgataagccacaaaactctctctcttatgtcgagtcgagtcgagtagagtccaactaatctcgctctcgatcagatcagataatatggttttctagaccatacatgaagttttcagcacgacttggctacactcgggacttgtgatcgaggctcacgacggattagtcgtcgtcgttgtggtcgtcatcatcatcacttgtatccccccaacgagagcacatcacgagccaaagtggtcgccgcccatcgaggtctcttcggccaatcatcacatcatctatctaagtataggtatccgaatccccctcgcgatatctctggacacacctataacacacggtaccattgcaacttcgaatcttcagtatcgtgaagctgcggccctacggcttttgccttccttccttaccgttgtcgacacctctggcggcatctctggcggcacctctccgatcacttgtgagatggaacctgacatcccattgcatataacgacgagagcaattcgctatcaactgtaaactgactcgagtctctgcgtgctttccaggaccgggtcttcgggaggatcctccacaagctcagaacgatcatctcgcccttctgtacccttccgcctatagtctacagacgtcagctacgcatgagtacgacaccatacgccccctaacgatcaccacaaagttcgaatcgtccgagcacgacattatacgccgtcattacgattcaatacgcctacccggcctcaccacagagccttcgatatcatagaacatgtcggccagcctccttggtcgccataccgtgccactcaaaatcgaatacgatgatcccatacccgataacgagatgcgacaagagtggttacgggatattggtaacccctacgatgatgcaagaaacgagtacagagcaaacggcggacagcgacgttgtgcaccgggccaaccaacgatgtggcaaacccttcacgcccaaagctcgctcctcacggaacgatttccacatgacctcgacagggaatttttcgcaccagcagcggctggagatgaaagtgatgatgacgagggtcatgaccttgatgacgaagaggccagcgaaagcaacgaagacgagcttttgaccggtgaggcgacctcgtacgaagcgcctttggagcgactgtcaatgccgagagggctcgggacatcgacaacatccttggaacacactctggctgacgtcgttaatgcggaatcttctgttgcaccgcatgaacccgagtgtcaaacaggcggaatctctgatgataaagagctgttcgcatcgccatccaaatatcgccaactcgggaagcagcgagccgatgacagtgcctcgcaaattgcaaacaccgactcccattctctagccgtagaaggaacgcgagccagcatccagggcatcactcctatcaagaaccagggttttggctccgatcatttcagaagcggtggtcaatttacagactctcacatgcgatcctatctggagagaatgatgaagcatcgcttcgagccccgctatctcacgatcaaagtcgccggcggggaggaacaacagccccgctttgatgaactccgccgcctaggaaccgaatacctcggttcgcctgagggggaacagcgccggaaagactttctagctttatccaaaacgcgattgacggaagatacattgcgccaacttgaccgccttgatctattgggcaaggaccttgcccgcgaagatatgggtactttgcatctgtgccatctgatcaacggcatggcaggcaaaatggtcggcacaagctatcagaacctatgtcattgggccggcaccaccgccgcccgcagcccagcagctggcaagaacttcaagagcgggttggagaagatggatctgctgttcctgaagaacggtcgttcacatctgggcgcttatcaaatggatgaagtgagcgtaaccggtgagggcaaaatcttagcttcctgtgacatgtcgccgaaggaatgcatcatccaaaaatccaaatactcggtacgctccttgccgtcagacttgcaacgtaagttacactgactctgcatccccgctacttcagtcgcgcctcgcgacggccaatcctatcgctggacagcttgtgagcctgtcctggacaggcaagtcgctgcgtttttgggcaattggaccgtcggcatacagttcatcgcggttgatcgatctgagtaatcacactcaccacgcactgttcgcggagtggatcgcattctgtagcgggcccgcggaccgcatccttcaacgctggcaacccatggctttcatgcagatgtctcgacccgtcccatcggatcgctgcgatatatgggaagtcgaacacgtaacatggcagccctattcgccagcaagtacagatctcagcgcaagtggtctcttgggcagtcgtacccagctgcttggtagtagaaccacagtttgggctggcagtctctcaatcgctggctcttcagaaccggctcccatagtgtgcaaggcctcgtggacgcatccagccttggcacagcacgagttcaagatactgcatcaactccatttcccgacgacgtcacaagccttcgccgccgtcccaaacagggaatcgattcgcaaggtggagtacctcgggatgattccaggttgcgatgacattatcgacagaattcctatgccctatggcagggttgaccttgccgacacacagtatgcccagcctcggttgcctcacgaagccaatctaccgagcgagcagaccagttcggccatccctgtcgagttgtctgtgctgatgactcggggcccgcccgaaaccaaagtccaggacatacacgagctgtcttgtcgtcagcttctgcggatctacatcgatgtcgtgaaaatactctggcgttccgcttgcgaaggggtccattaccgagatcccaatctaggaaacgtcatggcgagaaaagaggattcgctggagggggagccgacctaccgtggggtgcttattgattttggcaacgcggtctatgcaggtcagcggcgccgagccgaccaaacgatagaggacttcgccaacgcgtgcgccgatgacggtcggacgggaaatgcgtactttatgagtttacacagccacgaaagtcaatccctggccgaaagctacaggcaagcgaaaattgacctcgctgaagcctcggaggaccatgtgcgctataaaatgtctctcagaaacttcgaggaaatgaaagacaagctggaacaacacagatcacatcgatatgtcgacgatttggaatcgctgatgtactgtatggcctttgaggtttgtcccatgctacgacgcgcgaaggctccgaagtaactcttgtctttttaacgcagatagggcgacgtcgaagcatcgcggaaaaatccaaccccgctctgggattactcggcaccatcgagagcaaacgaaagctttgggatgccagactatatccggtaaggaaaactcataatggcgaaattttctggtgatcgactcacgccaattttcgatagctggctaaggcggtcgcacccgagtctgatacttggctaatcatgttctacgacgttgctgaactcattcagcacagccaaaaggtattggcaggtctcagccgcgacgaccttcccgaatcgctcacgtcggaggagaacaagtgtttccgcggtgtcgtcgacacgatggagcgggcatacgccgccgcgtcggcgagcgacattctccagccaccccagttgcagcccatatcgttccgccaatcatccggtgcacccagcgccagcaagaagcgcagaaggggtgcaagatgatgtcggggatcttatagaactaaagtaggtcgaacggtctagtccagatgcgctgagcgaggggtgggctatctctgccggaccggtgggcgtgatatgatacccctcgggcataggagaatgcgggactgatcatctcggccgaccttttgtttttctacagatgataggatcctaccagaacatgaaaggccgagcgaaggtggcaaacgggaccggatctcttcaaggggcctcgagttcgtgttgctctgggaggacggggctcgctaccggcttttctccatcgaccggaaccgaagatggtcagatgaccggtcgcttctcgacgcacagcttgcgccgctggatctgaacgaccgtgcaatcgaagcgaattgatatgggaaaagggccggttggttgtgaacgttgtctgctctagaaaaaactaccggcagaatgccccatctgacgtccatcatggccagaacataacgattggtagtggtccgaagctggatctacccctaagcagaacgatctgatgtttcggagtctggcttctgtcagattgcagattgcagattgtagtagtagcagtagaagcagtattagtagtatcagtggtagtacgtacaagaaatgccatcgcccatcctgcgatacgtctcaatgacgatcattcattgctacccgtggttgccaccaataacgtacatgtcatcgccgattgctggccacatatgggcacagccaatactgcagaccggtcatgcatacatagggtcgatcaaaatcggtacaccgtactcaagaacagcgaccggcgataccgaatgtaaaatcgaaacgaattcctcgatttcgagccgagccgtctttctgacgaatgccccgataggtaatggcctaggtcaatccatttggaggaacctagcaattcgacgcttgaggtccttggcttccttcagccacggcaggatcgcaaagcaatgggccatattggcatactatcgataggcaaccggacagacgtgtaagtggttgagtgcgacgagcttttcttaggggttaggggttaggggttaggggttagggttctgccccttcctgcccctttcaagccacatcaagccactctcgctcaccctctcactctcacgcggggtcaccaggtggtggatcatcggattaaagaccacggccgccttgcgaaatcgagggggccaagggggacggtcgggtcgatgcatcgctgtcatcatcaattccattcgattcggccttcaatcaaccaaaaatccgaacacacctcggacctcacaacgcaaccccaaccccggacctcgttcccattcccaactatttgctcaccggcgccgctctttcgaacgtgggaccgcgagaccacctcggggtcatgcgagaactgcgtatccgcgcctcttcattcggtgaggggcgaggcgaggcgaggatgaccagtctcaccaccggccaccggccggccgatagatagatgcaaccccgatggccgacccgaggtcgcatgacacgcaacgtaatcgagcttatcatcatcatcatcgtcgtcgtcgtcgcatcatcatcagccacagccagggcagagcgtcgagtctagtctacctcgaaagacgtatcccccttctggtacacaagctacaagcaagaaccagcttttggagctcgatcacacaaccgctcatatcggagtggcactagctcagagaaatatatatgaaaatgtccgttccgatcacaaacagagagagagaatctcgatacaggatggggggggcttgaatccccggatgactaccgacaagacgaaccctgacctagccatctccctcccacactgtctttcccgaccgtccgagaagaaaccgcaaggaaggggtaaacaaacgaaagtgttcggtagcagtaatgacgatgaggtccaggtagggggcgaaggttgtagtaaaatatgaatgaatcgagggcggtaacatcggagggtggtgtcttttttttgtgtctgttccgtcgcccatcgcgccgaatcgttggtcatgcaagaggtattcgtatcgtgatgtaggttctattcgtcgtgagggtgtcaaagggagaaaggtgtataggtaggcggcagtccaacatcgaatcgactatggcttgctctgttgttgatcgtagacgacgaaacggatcagtaaagactcgtgggattcaatctcggtgcaagggggaaagtgcgagacgtaccaattgttcctttcggaagaagacaaagtaaccgatgacgatgatgatctgacagatcagtgctacccagaacgcccattcctgcaaagtccccccagatatcgagcgtcagcacgccggccataaaagtctgacagacgacaaagcactcacagagagagggttgttctcgccggtaccgttaatgtcccacaacgaggggttggggaacacgccaccgggtccattctacgagatggaacgcgaatgtcagcgggcccgtctcgcacgaccttgatacgaccgatcactttgactaaccttgttgggagcggtagctctggcgatgatggcgacgatcgaaccgaccatctgagcgagcgcgagggtcgcgcacacatgcaacctcgacaaggtttgcagcaagatcataccgagacccacaccctggatggcatcgagaacaccaagccagagccacaaacaagttcccctgtaacgtcgagcggagcgaatcagtctcctcgctcgacagctttgaaaacaccagcgatgaactcacaagtagggaccggcgactcctccccaaggtacgtaaagaccgacacccgagactccccaccacatctgacaccacctagggcatccgagaccgacggcgaagacgggaagcaaccacgagtggatcttcgagtagtctgcgaggatgtcgggcgatgagtcgtctgtcaaaagctgtccctcgtcgtaaaacaagactcacgaatcaggagacccatcaaaagaccccagactccgacaaagaagatcgcaatcatgacaacgatagcccaggtaggaacttggacattgctccagaggtacgcccagtttcgaccgctgttgaaggaagcgaggcggagagagattcagcatgatggtggagaatgggcagttccggatagaacttactaaggtgcactcagccagtactgtggaaatgaggtgaaatgctcagctcgacgataaaagcagactacatgtcacgacagctcacgtttcgcaggacctcggcaatcaagaaccagatgaccaatttccttcggaacaaggtcttgaagaagttggggacataaggagggatctgaacaggaatgtggccaatcagtccctgttcccgaccgattttccaggcctgctagcactcacttgacggtagtagtccgggagaccccagaacatcaagtacgaaaagaccaaactgatgacggccaggggccagacgacgtacatcaggaatcgtggcgagacgtagtcgtcggggtcctgaccggtgagctgagctccccagtaccagagcgccgatacccagatctgttgcaatccctgaacgatacaagctcgcaaaacccagacttccgttgcggcaccagcttcttcaccaaagttgcatccgaagaacaagaaaccggcggccgaagcgatggcgtagaaccaggtcgcaagcgaggtgatgatcttgtgcgctccggtgaaaggtccgtgcaatgaaggcagaccgatcaagaagaaggcaacggcaaagctgcgatggcgagcagaaacaagttaggcaacctcgaccggagtgatccacgtcgagtccagtctactcacaacaaccaaggcaaagctaggacccagactgatggcctcatcctgaagaggacgtaccaacagatggacgcaacaaagaagatggctccgataatgtacaggtcgacgttggtggaggaattgcttccagtcagtagcgtcagttggaaggaggtctatgttatcgaagtcaaagtcagatccaaatatcgcgccgataatggtgtgaaccaacaactcacagccgagagcagttgaccgagcgaaatgacaatggtgtacagaggccatgtaccgatggaacgctgcatcattcgctgcagtcgtgtcatgggcttgtcctctggtctgacatcgtcaccgaatccttcgccataatgaccctctggcgattcgtgagtacccatcgaatagggcgctgagggcaaatcattgacaactgcgattcagttcgatcaggcgaaatcgtggtcgctcaaggtgttcagactcacactctgggcggtatccatcaatgatgcttggagctcgcgactggacgaacgaatcgcgcgacgacttgacactcgccatagctgcgaagtgaacactcggggatgagtaaatcgaagcaccgcgcaaaggatgtgctaaaactactcacatgacattttgcccttcttcaccacatcgaagaagtccttttcactcttcatcaagaacttctcgatacagaggtcgttcttcgagttgtcagctgacaggatttgcagcttctgaacgaatgtctgagcaacctcgccgtcggcatccgtaaagtcgacaatggccttgttgagaggggatgaggcacccttctcatccataatggacgaaatcgagtcgaaggatgactgtcgggaatgcgcagtgaagggtcgagaaggtgatccaaagccggcttgactgtccatactttgccttcgctccatgaaggggtcacgtgcacccttggtctgtttggcgatttgtctgttggcagcagccaggaagttgtcgtacggctgaccgttgaccattccgccatgctgaacgtatgaattagctgcggtcgatccacgctcggattgctcgtcatcctcatagatgtcgccaccgtgcggcgagtaggcgttgcccgtgaagaacttgggtcccgcagggttggccgggttgacatcggccgaagggctctgatcacggtcgtagtacaagggaggtacttgctgaccctgggcagatcgccggtcagggtcgtcctcgtagaacgagtctgccgaggctcggttggctttcctgttaggctcctcggcggtcaaatagccgttgttctgagcataccctccatgttgagggtaacctcctcgctgatcctcgaatccgtgttggggagttggagaaagcgaagggctggccaaaggtgatggagtgaccgaaccccgatgaccacccaaattgggcgaatccggaatgctttgaatgctgttgcgccagtcaccaccggccagactggctagactgtcattctggtgctggtacagtccaccgggaccagtcaagtccatgtcatagtagtaggcgtgctctccagcaagacctcggcttgcagcgatactcctcttctggaagtcttccaaccgttgacgccattcgacgaccgggaaacgctgtaccgcagatcgggctcgcagaatagcccgctcttcctgagtcgaacgcagggccagcttgatagtcttggtcaactgggagagcatgtgctcggtagcactactctcgacagggaaccaccaaccaggcatcaaacccaaacctcctagccttgcacctacaccgagagcaccctttcgtccgaattcgacggcaaccaaaccgaaaggttcgtcacgcgaggggattaaggcaaagtcggctccagagaacaagtaaggcggcagggcggtgaattcgggcttcgagaatactcggtcagggtaaagctccatgagacgggcgagcttttcggcggcgaatcgaccgtacaagtcgatgacgggtccgacggtaataagctgaaccttgggcttcttgtccaggatcgagggcatgacgtcggcgatcaagtcgacacccttctgcttcgaccaacgaccgacgaatacgaagagctcggcattagggtcttgcttgaggccggcccattcctgtgccaatcgcttgtcttcaggtcgtttggattcggcgttctcatcaacctcgatcttgtcgacggcaataggctgctcatcgagggcggcaatatccgtaggatccgggttgggcagcgagtcgatgttcttcagggtccagagagcggggtatcgagcccaagatcgctttccgtacttgtcggatacaccggcgacaccaatactcttctggtggagactgatgaagctggcaccggcgtgaagcaagttgaaggtgtttccaaattgcacatacttggtacagatctccttgggaatgttgaaagccgcgcagacttccttcatctcttccttggttcgaagaggccagagaccctggaattcggcgttgtgcaacgaaagacaggtaggaagcaccttgggcaacaggtaaagaggagccaaagcaccgtgataatcgttgatatggtagatatcaatgaccgggttacgacggatggtctcggcgatagcctggttccaggtcgaatagaagatggcggaactgagatcgtccattcgctgagggtaagggtcggccttggtctgcgcacggaacacgggactgtcgaggataacataggtgacgttgtccaattgatgggtttcgacctcgatcaagtacggttcaccaaagatgatgacctcgatgggctcggcgtagtctccttgggggtattcaatgtccttgaccttaggtacgacccaaatcaagtcacagtcgctcatggctttacccataagcgaagacatgactccgagacctccaattttaaccttgagcttccagtcgatgatttcgtactcgagagtggcgataagcacctttctgcgcttgccaggtacttcaggccaaccgatgggtttggtgggacgcttctccttcttttcgctgatcgccatggttccgccaacgatatcggctccggcgtcagctttcttctcgcgaccaagctggaagtagctcgtgcccttggtaggcttgacaccccacttgttgatcttgatggcatagaacgagtatcggaagatggcggcggcgatgaacgcagtgataggaggaattgccaacagcaaggcgaacaaagcgacagcggcggcaaagtgacctcgagggataatgtaccattctccgctcttgtcgtccaggaacaaggtccacgaaacgtgaggcatggggggagtcgaaatgttcaagtaattgggcgagagggcattgggagggagacgatcgataatgccgtccatatcggtgtcaccgtagaagtaatcgtcgtatccatatacgttgagctgtacgtaggcgggccaggtcgacatgaaggggatggaccaaagaccttgatcgtcattcttcatggcggcgtgacgaccggagtcgaaaccccactggttgaattctcctcggaccaagagctgagggaatcgtcgtcgaccttcccaaccagcatcgccatgcacgacgacggaagcggatccagcgatagctgaccagtattgcacctcgacgtgatgaccgtcccaccacttgtcctcgaacaaggtggcgttggcattcgtgacggcctcgtaatcggtccaagcggtccaagtctgaccaaagtcggcagaatacctgaacttgtcggcaccaggcgaagcatgggtaatggtgtactctccgttgctttcggtcaagagcgtatcactatagtcggcaacgtcggtaaataccatggcgttctccgtggttccttttcgcacgagaagatggtcagtcgccatggttcgcgcaccagccctttgtgcgttcaccctagcgacctgaatgtcgtagagaccgtcaggcgcgtcagagacagtcgccgagatataccaagccgaaggagcgatggcgacgatctcggggtactcggtggaattaaaagtctgacagacgacgttggtcagcctgggctgcatgcccgaaccggcgaattgtccggtaatcgtaatcccattctgcaccgaagtgcaatccatctcctggtcatactcgattcggatgttgaacgagttggtatcgtcagacatcaacctcgcatcgtgtccaggctcgaacttggacatcgaaggagatccaagggcgaatcgggccacgggcacaagagccttgaactcgtaaggcttcatttcgacacggggaagacatcctcggtaaggcgcggcgttgtcgaggttgaacgactccggagagttttgcaattcgtaggtttcgtaaggatagaacaagttttgaagggtgacgggggcagcaaaagcggtacgaagccatccatcttgagtgcaatccctctcgtactcgatggttctgttctcgttggtgtagaggagcaaaaccttgttgccatccgtgccaaagatgttatcagtagactggaaacccatggggcctcgctcaacaatccaaagacccaattcggtctgggtcttgttagaaccgggcagttggatgtagtgggtctcgttgttatgagggtgaaggtcgagaccgtctcgcaaagtggggaacatgtcacgcatctcgttcaagtgcgtgacgagccggcggatttctgcagtagggtcgaagtgatcgagcgaattccagtcgtcatcgcatcccgtcaacgccttgtcataaggcatgttgtagtattgcgaggatcccatcttgtaacaaccgtgacgctgccaagccttggtggagggcatggcttgacgaccgtagagatagttactagctccattgtcgaagaggtacatcgactgttcctctccataccaaagcaatggctgaccgggtagaacgtgcgcagtgatgaaatttccgagcgcgttcttgtgagttccgttggtcagactgggccacctgaacacatcctggttggtggttccgtactgatgcctggggtcaaagacctcggtgttggggttcaggaaatcgttggtaatcaccatcatcgaccaggcgtcaacaaagttgacggggatatcgtaagcggtctgcaagtttccgtccattcccagaaatcgggcgagggaacggtacaccgagtagtggaaggcggcggaatcgagcgagttgacacctcggtctcgcaagaagaattggtcgtcagccgtcttcatagtcgtggcctggccaaagtcgggcagttgctgaggggttcgtcctcgtccgtagtacaaggcaccgaaagtgtctcctcccgtgacttctccagggatgaagaagttgtccttgccgacgtccttggcacactgtcggacgtgctcggaccaatcggcgagagcctgaacggtaacctgggtagccttgtcgatacgaattccatcgagatcgagcgcctggatggcgagacagctcaatttctgaagcttctcgttgacgctgggcatccattcacgaagacgatcctgcaccgaggcgaacttggacaattgacgttgccaatccgggaaaacaccgaaagcttcggtatcaccgtactgatcgaattctgagtggtaacatccggtggcggggaccgggacgatctctccgttgtcgagccagaatacggggtattcacaagtctcgttgtactgcgagttatcgaatgaccagtctgggtacttgtcgattccccaaggggcataaggagggagcttccactgggcctcatactcgtccagcgagaaaggcgtagacgagttcaaatgactgtttgagcgagaatggatggagcatgagcatgtctcctctcttgtacagacagcgcggggtgacctgccctttgaaaccgatgtaatctcccatggtaccgaccgtgaaatcggcaatcaagtacatgtcccttcggtgcatctcgtcgatcaggtcgacccactcttgcatggtaccgaagtgagggtcaaacagggtgaaatcgataacggaataacctgaaagtggtggcagtgaatgatgtcagcctttcaaattctaccaagaaatcgcccggacctcgacatactgtcggcttgccaaggcatgttcaaccaaggagtaccagcgatatacagtgatttgacacccattccttgcaagtaatcgagcgatcgggggttcatcaaacccttggcgtcaccaccgtaacgcaattgggtctcggtaagatcccactcaaattgcgtcttgaagaaatcgttgttgtcgggctctccgtcgtaccacttgtccaaaaggagggtgtaacagggaagagcctggaataagaaggcagaggccatgagctttagagttcataaacctggtatcgcacagcgcagatacaacttactctccagttgtcaggactcttggtataattaccatgaggagtagtggtgtactcgagaacggttttagcgtctgtgcaaatcgggtcaacgttcgattagcaccaacgcgaatcgacatgtgcaaagacgaatgtggacaagagcccggcggacactcaccctggttcttgttcatgttccacggatcgagcgattcattgtaaatgaacgcgtcgacggcggagctcatcagtccgatgatcgcgatggctgtcccggtccatgcaggaccggacgtgatacccatcatagtgaatgcttttttgctctttcagggcgatgtggcaatccgttctaggctgttttgtgggttattgttctttcaggaaatcagcgagtgcaaagattctgctccggatcctcgattgatcgtggcgacttgaccggcagttcgagtgatggtcaggcgaggtctgaagacgagacttgagggcgtgtggtagtcgtgatgatcgatggatgtagagtattgtagagagacagtcctgatagtcgtgaatttgataggtctgtggtgaggctattgtttcccacagagaaaaggagcgtctaaaaaagagtcgtctaggcgtgggaggtcgtgaaaagagccacacgcttgaaaggcgaggttgactgctgaggggaaagaggaaaaggttgtcgaacgggagggaggtcggggaaagccttgtcgtctagggtttccgctctcatcaaaactacgtggtgaaggcgtaggttatgaacgagtgtgttgatgtcgaggatcaccttgcacgtacgtcctcgcgattgatggtcgaggggaaaggaaacgggaatccccgccatgtcgaaatcccaatggagctgggactcgacgcgcttcgcttcaaaacgaggcgaccgacaagggagggaatatgcaggggagggcggcaggaggagcggcaacgcgcgcgctgatggggtgctggggagtcgcgtaaggagaccgggggtagaggaggaacacacagcaagcacaagatcgtcacaaccagggcaggcagaggaggggagaaaacgcgttcgatcaatggaacacggtcgctgtctagtgcaaaacaaaccccatctccgcgctcacgccgaacaatgatgaaaaaccgcgcgatctcgacggatcttaatgccacgtccccaagaaatcgaccgaagctctgtcatctgtcatcctgtgcttggctcctggctgatcgctgattgatgcagcaggccacgtcgcgctgtgccatttgatgaaatccataaccgaagatcgctccgcccagaaacgcgcccactggcccctccccctgcttcagaaaccgctcatgctgtcaagcgagcgtttacaacgaaaccacatttcgagcctgtacggccttggtcggggtggcatccgccttcaatgaccacaatgtagcgacttgagcaattgagcaatcgcattcgggccatcgtgattcaatcgtggatcgcaaaactgatgacgaccgagatgatcgtgatgaaagaaactttcgtcccgctcggtgccgcactttacccctatggcttttcccacgcgcgcctccctcggacgccttgcctgcgtcgatcagcaaagcacagccgggatgatatgtctcatcctacagtagtggagcgtcaccatccgttgtgtttcatatctagaaacatcacttacggccggggatcgggcgtagctagcgtagcagatgacaaagacgaaccacatattgaaggttgaagatagaggagcgcaacttgctacaaacgacattgccagcgcttggtagatcccaggcggtatacaccaaggcaaacgtacatgacaggccataggcggtgttatccgcaggacaacgatgatgagcttctgatgtgtgcgtctaccgtacagtcactagaatccagagcacgtacaagcggcagacgaattctacgtttgatacttgacgcggcatcgatcggtaggccattcaattagcttataacaaaagtacgtcaactgtatctaactcggtaggggctgcaaaccatattgctttcgggaagataagctcaacatgcgagcacaggatcaccagaaccaggccatcacagattcctcagtcagacttgcgggacttgtgtccttaaatcaagctgggatctggaggtaagagacatcgcggaagttctcaaccacctctttgcgaggtacgataatatcacaggagatacttgtagatgtcaccgaagctgtcggagtgtcacttcaggcgcataatccttacctgctgtgcacatgtaaagtggtcatgtcgtttatattgactggcggatcgatactaatctgtcgtagagagagtgtctggtaagtaccgacgtcccaacatgcattgaacgcacgaagcggactcgatcttgccatgaagcttacataccggtggtcattacccacaatttgtcgaatattcgaagatactcactcaacatattcgatagtcgatttaatctgaaagccatggcgcaaactttcagcaatgttaacaaccctggttgacagtgaagcagtcccgttcgttaccattgacggatcacgccgcgagaaggacctcttatagaaactgacaagcttacattgacttacaagaagaggacaacacaatggctacaacggcggttcagtgttgttaccgaggtcaaggcttacaaggaccaggatctgatcgaccgcaaggcagagaccactttgactgttgaggaactggtccgaaaggagaggacgtcacacaatcgaggcgcggtaaaataatgttgattaggttatgctgagcctcatcacggtctcacttccctaagctgaaatgcggtgcgaacgcagtagaccggtgactttcgggacgaagcccatcaccgatatcatcaagcacgaggaatggagcgcaagtctataactcttgggtactagtttctagttccaacgagtttcggtcggaatgagatgcattatagatcactcgctcacacttactgttcgcgcttgaccaagggcggtgaaaagttggagcgacagatcacgttatcattcgatgatctgctgaccttgtcccgatgtgaaacatgctaatcgcacaatgtaattcgactgtcatatgaatcgaaaccaaacaaatcgaaaaggcaatatcgctaccatacaacgttcaatcactcattatacccatcccaaaacgcactgatttactcgataatctctttcctttctcaatctggccatcaaacacctcttcgggccttcctcattggtatatttgacccggtcaatgactctccaagagtcgaattgctcctcacgtgagttgttcgaggctttgtcttgggcaatgcgaggccggcagtcttggcgttgtccccttctttcggtaggaaagcaacaaagggagggatgttttcctgctcccgctcatctgcttctcgggtgtcgcccgcgatttccggcttcactgtatcttgcattgagctagagaccgacacaggcgagaacgtaggagtgtcttcaacgggggtcgatggaacagagtctggtgtcgttgtcgcctcttctgagctttcaggggtgtaagtgggcatcgagatggaagcctctccgatcgtctggtagaggacttccccgtcctcgtccccggcccgagtttcgtcctgcgagtcttgcaatttggtcctgtatcgctcgagcaacgcttcacgaggctgagtcgtctgccaagtcgcaggaacgttccaagcgcgcttgcggggagtcgacccagtagaaacatcttctcggacgctggcgacaaagtcgtggtggatggttcggaggtccttgacctggccctgagcatgagaacagtgttgtgcgaacagcggctccgcgttcgaatgctagatatcgacagagaaaatttcaaatcaggatacatcgataagggttcgaccggtttttgtaacccaccgccgttagcaccgcttgcgaaacaactttgatgtcctctttggcgacgataatcctatccttggccacgttgaggttggcagcggcttccacgttcaagcggtccatgccttgagcagaactcttgctggtgtgtcggatagtgtcattcactgcgaagggaccaatcgtcagtggagcaagactacatccgaactatggatccaactcacgagaatccagaccctgcagcgactgctcgacagattggtccagggtcgctcgctgttgtttgatccgcgtctcgagctcctccaggttcgcatcaagatgttcccgtaccacattgcgagtgtcctcgacggcctgtgcggggaggaaagcttagttgaggttgtgacgaccaacaatctgttcgataagacacaccttgccagcgtcttcccgattggtaatatggctgccccgaacgagttccaaatccttgcgatattgtgtggagcgctctcctgccgagtcgttcgcttgcttgtacatcatcatcgactcttgcgaagcgacagcgccttcatcgttctcgatctgaatatcgcggaccgccttgtctaggcttgcgctttgtgccgtcgtgaatccggtcaacaggttggtgatctgggataccagatcatcccgaagacgcgtggatgtttgacgttcctgttgcaagagcgtggcgagacgctcgttctgactgcgcaggtgagcgacctgttgaatcaccgtcagatgtcaggaactcgtatgagcgcccaaaaacacatccagctcacttctcgatcgtgcatctgtttggcgacttgctgcaaagcttgtgccgacttggattcgtgtccggtctgctcgatagcaccgtcgataaggacgtcgatcgtctcggccatgtgttcgatcgacccgttcacctgcgacggaaggacaacgtcagtctcgtcggatagccatactgcgagccatacccagactcacgtcttgcaaatgagacgcgtgctcgccggctatccgctcgtgagcttctcgttgcaaatttcgaagcgagatggtccactcgacgaggtccttgtgaacttgttcctgctgaacgcgaagctggtcgatcgcgcgtgacatcgttgcctcgtctttctgtccctcttgcttgaagctttccatgctcgccgagaacgtggccaatttggcggtcaagaaagccttgtcttgttcgagtgactgaggcaggccagatcagatcagccaggtgctaatcttgcgatcgagcttgcgatgacctacctcggctcctcgtttggcaaaggcctccagctctctctgcaaagtcccgccaaagttggtctgaacggtcttcaagacgtccatatcctgatgtaatcgatccgccaagctgttcaacttttggctataagccgaagtggacccggcgttggcattcagtacgtcggcctttcgagctgtagatcgagcatcatcgatcagccttggtctgaagcgctgccccatctacgtcgacttaccaatcttggcaaagagacccccgacatcgttcaagctttctaccacggtccccttcaaccccttggcgatcccatcgatcctctcctctcccttgcggtaattctctccgacccaacgttcctcttctaccttgcgggtgagctcgacgacgactccctggacccgttcgatctcgaccttgagctcggcggcttctcgtcgggcaaagacgagttcctcctccctggcgaggagcatggccatgttggcctcgaactcggccgtcaacgtcgcatgcttgttctccaaggcgtctgcccgctgtttgatatcctcgagctggttcttggtctcttcatgctcggacgacaattcgccccaagtctcggcggaaaagtagattccgttcttttcgtgcgccgccgagagatcgttcttgagtctttcgatctcgacgacgtaatccttgatcaacgtgcccttggtgagtcgctggttgatctcgggcttgttcctgatcgtcttggcccggatggcataatccaaggtcgagagggtctcttccatgttggatttcgtcggcgagacggtggccacgatacacgtcttggtgcgaccgccgagcgagtcttgcaagagtcgagtcaacttggactctctatcggtccggagcaaacacacgcgtcggtcagcgactcgaatttcacctcgatcgcgttgcatcgagacggtccccgggactggacgtacctgtacggtacgtgactgttcttctcgacgagcgccgagatgacccttcctagggtcaacaaactctgattgatcatgcctgcctctctcgcccgcttgttctcggccccgctccgtccgatcgcttcggaacccgccaggtcgaccaggttgagtttaccgaccttgagcaggtcttccccgccatgtacggacgattccttgatgtgcaccgtcagggaaaagatcgagtgggatcgactgtgcgtattccagacgagggaccatgatatgagaaccagaccgccggtccaacccgggctctcgcagcgccaggtttgtagaaccaagcagatagactcacgacgactcggtgttcatcttggtctcggcgacctgtctcctttgggaccccttggtcaacaaccccaacccttcctttgcgttacggatactactctcttccaacccttgaatcgtcacgcctccctttttgttggcgtcctcgtaaatcttcaacccgccgaccgtgctcccctgggccgtactcgacggtcctccgagggcgacgggttggtggaaatcggaagcgaggaggtcccgtagttcttcgttgtacaactcgacgtaggaacacttgacgctgaattcggcattgggaacggattcgagcagggaaaacagtcgatgcaggactcgagggatgatcccggcttcggcgcatggttttcctaggggagtgagcgaaatgtctccttgcatcgtatacctatccgagacggaaacaggacgatcagtcgtccatcccgtcgatgatcgcttggaagctgcaaactcacgtcttgcccgtccccgtctgcccgtaggcaaagatcgtacagttgtaccccgcaatcacctcgtccaacatgttctcgacgacttctctgtagacgatcgtctgatccgcttcgggtccaaacaccctatcgaacccataagtcttgctgacgggcgctcgttccgagtagggtaaggtcgtcacggggagtcccaacccggacgtgttggagatggtggaatgcgaggtctcgatggtgatagcggaagagaccgcgccagaggtttggcagatgatgggcgtgcgttgtgatacctccatggcagatcggccgctggacgtgatcaagaatcgacccctctcgaacgtcagccccaagccaccttttaggtagcacgtagaccctggcgatttccaagactcaccgacaacgaacaacgacctggatattcatctctccatcttccccgactttctctgtaggtgccaccttgttgacctttttctcactgctgaccaccctcttcctcgtcggactattcgcccgactcccctcgtccgcccgggtggaagcgctcatggccgaagctggtcgattagggatcctcgatgggggtggcatatcctgtttattcaagttggaggaggaaggtgcacggacgagcgagctggatgggcccgtccgtgtgtttgtcgatgtaggtggtttcctcgacatcgagtgggggtcgagcgcgtgaggttgcgatttagctcttcaaggtgggggggtatggtcgctatcaaattcgctgagaacgggtggctatgttatttactttggtagctactgtcagattcttgttgatcaatcaaggtcaagatgacgttgttgaaagtgtcgatagggttgcatggtagcatggtggtggtcgttttcgtcttcgttgttgtttgtttcttgtttgtttgtttgttgatcaacattccactggttggtgtgtggtagttcgcatcaagagacccaatatctaccaaaatgaatattcatttcaagtgaaacacccatcggatgacgtaatcgaatcatatcccagtcaaatcttcgacaacatactgaatgccatgaaatgccaacaacacgcccctctcattaaatctgcagtcatgaccaccaccgactaccactctctaaccccgtatcgtataatcgaacccggcctcgacacacgcgcaacattacatcattccaccctcgtcgggtccgtcaaagttgggattgtcaaacaagaagttggcggccagctcttcgttcttgtcgcacagcatgtacgcccggaggaccgattgacgatcgaacccgagggattccaactgacagacgtaaaggcccccgggagcgaatgtcagcggacgccatcttcccccaatctttccttcttgcgatcaaggccccctctctggactcacccttcttacggcctcggcctcttgctctgtcaactggatgaccgtctgtcccgccgcgcctccttgtccgaaatccccttcctcgaaatcaccctcctcgtcatcacccgccaacaactggtagaaggcctcggggttctggttgatcagttgggcgagttgagggttgttggccgtaatctgctggatgaggggttggatcatcgccgggttctgtagcatgagctgtgaagaggaggaccggcggcgcgagcggagaaaaaagctgggtatcagcttggggtgtcgctttgagcaggatccgtgttcgcattcccagacctcggactcacctgacgcaattgctgcaacatcgggtcgttctccaagccttccaaaccagctggcaatcccgtccctgcgccggccccggcccccgcacctgcacctgcacccaatccagcgcccgcacccgcacccgctgcggcacctgctccgaccccgcctcccgccctctgttgatccatggccgccctagcagctgcgaacaagttgtccgcggctcccgctcctgaagcaggtgcggacgctgccgagggtgtcgcggcgagagcttgaggttgagcttggttctgcgccggggttggtgtctgaggaggttgttgctgttgttgttggggttgggcctgaggattcagaacacaatgtgatcagctcgggcgacgtctgctgatctcgggggttgccggcacggactcacagcctgaggagccggttgatccagatgagccgggattccctacgacgacgatgcgcgcacgtatatcaacatgatcagcctctcgtccagccccgccccgccttgtcccaccaagttcggagtgtcaaccgacacctccccgcactcaccgtcatcaagtactcgacggctctatccgggttattaaagctcgctctcaaggccttcatgacctgttccctctcgaaccccatgtccaccatcccggagatggccatctggagcgcgtccccgctgatgaaactcgagttgttattgttgttgtcggcaccgcctgcactcggggtggaaggtacagggttggcgttcggggtcggggtggaaggtgtagccggtcgaatgtctgacaggttgcgaggacgggcgggatgatggtcgaccctgacgacaaggagaaagtctctccacgcctgttgaccgaccacctcgcccgccattgacccccgtgccggacccaccttgtcctcgtccatgatccacgtcttccactcctcatcccatccctcgtggaaccccttttctttcaccaactcgctcacgttgatatgctcaaacttgacgtcggcggtcgagctggccgaggcgaggtattgagcgtgtgtggatttccccgtaccaggggtaccggtcatgaggatgatggggaattctcgagggtgatgggtggtcattgtcgttcgtcgtgctgggtagtatattagagactgttcgtggtgataggtgaggaagttgggttaattcgatggctgaattcagtttcgaacccgtcgtcatggttcatatcgtcgtcggtcgtgcaattcaaccaactttaccatccaaacttgaactttcggcgagacccggtgctagctggatgatgaattattgtagcgcggacatcagaaacacacaggtctggagatatgtccgcgttgcatcaatcgcggacatggcaagtagtttagaatgtccgtgcatcatcgtcttctctacattatctgaccctcggcgatctcccctcggctgggacggctgcgaagcggaagcaagtcagatatccaccgagagcgagaggcagcacaatgccaagacaactcagaagccggggaaccgcgcgcgtcatcggtcagatccgatagatcgaacgtgcaagaagggtcgagcgggctgttaggggtgtacgaggggtggcgacgtggaaccagggggcgagatgaatttcccggtaggtgggacagtcagtgagcccggtgtcataccgggaggaggagggcattttctgcgaattctacgagctacgatgacagatccgatagtaggtgttgcgattccacattacgcatgtttgccatttgccggtttggcctggtgatacgtgatacgaagtttgactgcgcagtcaccccgtgccaagataggtcggattagggcgagcgaacggagagttgtatcgtgtgggaacccggtgtgtgtatgtgtgcgtccatgcgataacccttgatctgttcgagcgtgctagtcttcggtgatgagcgatgagcgatgagcggtgagctagagctagagctagagctagagctagagctagagctagagctgggctgtgcgcgcgagacaacgagagagataaaaggaaatcgaccccccctcacccgcgactcgtcatcccccttttgcctcttacactcccctcttacactctcttctgacacgtcgtctctatactttggagactcccatcgcatctttacaacttcctttttaacaaggaaaaccagccagactacctctctactcctttcctaaccacaacctacccaagccgccactcttttaccgatcgcaacgcccagcagtcgatggtcgaagtcaacattcccgaacaagaacccgaacccgatatacgaccttcaagtcgtccatcatcaacatatacccacagcaacaccacacaacaagcacaagcacaagcacccacgcaggacaagagtgtcgacgcctccgatgaacacgccgtgagacgatcgcccgatatcatcagcgccgacgctgccactcgcgccacctctcacccagtcgatcaggatcaccatcacgatcgctcgtcctcttccagcgcgaccaccctcgctgctcctcttgccacccacaatcaaacgcaccacgatgtatcagctcgaccctacattccccgatctgatgcggtcgacgtacctcccgctcagaagggcgactcccaggccccgatgaggtccatcttgcaaggagtcacctcgaggttcacttcttatcccaaccaacacaatcgcaagaacatcatcaatgctaccggtggcaacgccagtaatggctataccattagcaagtcgtcgcccgacctctcgagggtggacgaaaaggaccacgcgtccttcatgtcgagctcgaccgacccggctcattcgaccagtcccttgtacccggcgcacaatgtcggctactcgaccggcccattcggattcaagaggcagcacctacacaaatcttcctcggccccgaagaacgacttgcattcgaggttcaatctcttgagagacccttctcctctaggcgcggcgggacgagcgagtgatctcgatgagaagcatgtcaatttcaacaccaacaccctgctcaacatccacggtgtgcatgcgcagagcgggatgacaccggcggcggcgggtgctggagaagcgttgccggatccttcggaccctctcgcacagggtacgggtgggatcgggttgatcggacctatcaggcctaccaagagcatggcagagttgttggtccccgctaggaaattgggaacggaccctacatggagcgagtcgttgaggaataccgtcaagtgtgagtcttgagtctgatgagcgtgcaaagtttcgtcgcgtaatgctgatccgggtttttttttttggtttcgatcctcccgtagcgtctttcatggtctacctcctcccgattgtccccgtcgcatgggcgttgcacttttccggtcaatcagacgtcatcgtctttgtcttttcatttctcgccgtcatccccctggcctcgctcctgtcgtttgccacggaacaactcgctctccgaatgggtgatgccctaggtggtctcttgaacgctacgttcggaaacgccgtcgaattgctgatcagcatcctcgccctggtaaagggagagatcggtctggtccaagcttcgatgatcgggtccatcttgagcaacacgttgttggtcctcggatgttgtttctttgcaggagggttgaggtttcacgagcagatctactcgacctcggcctctcagttgcaaatctcgttgctcggtatcgccgtgagtaacaaatcggcggattgtaagtcatcctttctgccgggactgaccttgtcttcttcgctctgtggcttttggtgaaatgcgacagatgtgcgctctggtcttgccggcggcgttccaattctcgctctcgtccttgtcgaccgtggcggtgacgagccccgtagaggagattaccgatctcagtgggagtcaacgggccaccttgttgtccatttcgagaggtgtcagtttcatgctcctctccacgtacgccgtctacctggtctttcagctttacagtgagtcgaccgttcgaccgatgcgtctgaatcggctggaacgccagagctgatcattcctggtcgttggtgactcgattagcccacgcctacctcttcaagcgtcgaccccaggcgatcaagcgaccccatcacgagcccggcgaacctcacccgaatcacgcaaaggtcattcccatctctgaatgggtggcagccgttcgatcccgtgggagcgcttcgagctcgtcggacggattgaccccgacgacgacaagggacacgaccatgatgcaccctaccgagggtggcgcgagtaccgccgtcgatatcgaactcggtgggacggccccgacctcgatcagggataaccgatcgatgctcgagttcgcttcgaccgatgacgaggaggaagaggagaaacccttggtcaaggcgctctttgccctcgccctcttgctcgccgtcaccggtgtcactggaatgacggccgagttcctcgtcagcagtatcgacggcgtgacggaatctaccgatatttcgcgggaattcgtcgggctcatccttttgcccatcgtgggaaacgttcccgagcacgtctgcgccgtcaccgtgtccatcaaggacaagctcgacctttcgctcagtatcgccgtcggatcgaccatccaggtcgctttgggaatcttgcccctcttggtcctcgtcggatgggccatcggacaacccatgtccttgttctttgactcgttccagatgtgagtcctggacagatgcgcgctgcatgtcgtaccgatgaaactatcaagctgatacgataccgatcttctcatttgtagcatctcgttggccgtctcgctcatcatcgtccagtttgccatttcggacggtcgaagttgtttcgccgagggttacatcttgatcatgacctagtgagtcgacgtcgatcgagacttttggatggttccgaccgggttgctgaccgcgacgatgttctcttctcgtcctgtgcagcttcatctttgccctgtgttcgtggtattacgatccttccaagatcttgtaagacggtctataacggacccggagcactcgcacgccaataggaccaccggaggtgggacggacaatttctgaacagatgtgaaatcaattcccgagaagacgtacacgaattgtcttgatagtcttttttgtaacgaagaccatacacgagggcttcatagtgtgtcaaacatgtacctgaataaatagatatatatctgcacgtcgacgaatgatcaccagcagcctgcttgacaagatgagagatcttggtcgtcaggacctatttgtcctggtagtggcagccgacaggcgccgatcagtcgagctgagtgcctcatggttgtggtgtgtagtaacctggcgagcagcaccgtggtcatggtgcgtaatatcttgatctgtatgggctcaactcgatgggccagtcctggctagaagattcccccttgtggagtagtggttgatatcagtcggtgtcatcacagctacctaaagtcggtactggagggggaaaccgtatcggaacgctatatgccgttgcgtttcccacccatttgaagtccgcacacagctgagaagaatcgggctttatcgatagaataatattgtcaacccaggatacagtatttctgggctcacacacacggatggcctcgacgaggcaggtgccactcagaagcgggtgatcaggacgacatgattctcttgttctgaacgcaggcaggtttacccgcattccgatgtataggtcaacatccatccgtgccttcaacttttgccgggccgagggaaaaggttggaaatcttgagaaagccccccttccgttagagcacagagaatattactccttcgggtccgacaacctcttcttctctgaaacacgcctccagcatgctttcccgcgtgactcggcaacgtccgaagccgaaacggagacaaaacagacagaaacaccgaggtaaaggggagggagggaagggcgacgaaaaggtcagctgatcgagaagcgtatttgctttccagagaagcgaggggatatgggctcggtcagcaggagggagggtgctattgcctcggtggacgggaagcaaagggtagagatggaactttggctttcgaggtccagagaaaccaaaacatccatttgcgtccggtagctcgtgaatcgtagaaagctacttgcttcttgtgatcatctgacgttgctcgtaccaacaaacactgatcgtcgtcatttctcgacgttatttatcttcgtaccgcgcatcatcatcatcgtcatcatcggtgcaggatcagacacagcccggatcctgctcgtcaggtggtactctcccgacttcgacaacgaaaggtatatataacccgcattctgttgactcgcagcacatggaatagacctttacaagagcgaccttcggacctatatcatcacaccatcgcaagaaattcctcctctctacataatacaagatgatttacacaaccttctttgcaattcttaccgccctcagtctgacctcggctactccagtcaaacgagcagaagccttcctcatccgtgccaaaggtagccccgataatgtcagtccctctttagtctcctcacccatccctctcgcgctccctctgactgggcacgacgacgttaacttccggtgcaacgatccagtgtctcggtgtgtcgggtgacctgtacaatggcgtgggactctccaacgtcgcctgctctgaagcggacgtcccgaataccagtttcaagggcaagttcgagatcgccagagggaacaacgccaacgggatcaggctgtcggggaccaactattgcttggattcgggcttgcgtgagtctgaacgcctgaatgtgttatgatcgggaccatcgcactgagatcgaggggagtgtagcgatcagctttcaaggggctctgaagctctggcaatgttacccggggactccccaacagacgcaagtcccgcgccgtgtcccttttcatcaaccacctagctgaacctttaacgatacggtatgattctacagatggtactataccggtaagtaacgagtaacaagccatcccatttccaccacggtctcatccccccacgccttttgacagatgacgaccatatcgccctgacgggccagaacagctgcgtagactttgccgggaacggctgtggtcgattcgcctgctccccaggtagagccgcttgtggtcccggcctgttctccccaaccggacaacagtgggtcttaggctcggtctctgtgcctccgcctcccccgcctactcaagaaggaagggtcttgcaccctaatggggatacttcgaaatgcgtctacggggggaacatcaaggaggccgctcccggggtggctcctttcatgtgagtcacatcccccgccccctcctttcatgccaatctagctacatctgactggacgctgtattggtacgcgatcgacagtgaggcgtgtgcctcggcgggacccaactttagcttgcagtacttcaactttcagcgaggtcgaggtgcaatcaagcttgcggggagctacaatctctgcctggattacggtaccaaccccaagaacggggatatcgccaggctacaaacttggtcagtactcgttcgtccaggcggagtccttctgtacattgacattggcgagccggggtttgtagcaacggcggatcgtcgcaagacttttactacaccgatgccggggatgaccatatcgccattactggaggatgtgagtgggacccctctccttcgatctgaagtttcttcgactgaccggccgtcgtttcagctctttgtttggacctaaggagggaggacggcaggacgcttcagttctggcaatgcggtagtaaccctcaacaggtatttctcgacgagcgattcgggccgatggacgggttgcagagctgatcatgactcgattgcagaaattcacgctttaagcagggggagagagtttggagcgcggggatgtggacaatgttagcgagaagaaacacggacaatcattaggaccttgatcaagaaatgtgtaatgaaatgctatagttgaacatgatacagttacactcgacctggttgcgccttagtgatttcgcaaagtctcgatcgagttagaagcttaagtgttcgcattctatcatctataggaccccatggtacacgagggccaattagatgattgagagagcaggcaacttgtacaccaacccaggtcattagtccgtcagcgtaagtgtaggctatgtcaacatcgtagaaaagttgaagagggaagactagatatgaccacggcaggacatccaaggtcaagggcggtggctatccgggctcgggactatggtatgatggatattgtattgcaagtttgtaacgggccagtcggtatatacaggtcaatagcagacgtttcgtgcgagtacagaacgattcagcagtctttttaggctttagatacgagacacggtttccttttccttttccttttcttttcctggttgtagagagtctttggattccagtcgctatcactcaaacgttctattggagtttcaggtctttcctgcccagctgccatcgaggatggccaggcaatgaaaccgatcaccgtggagccttatggctaccgcatcggcactcgtgcttgcagatagaccgcttgcgatcagctcaagttttcgccactcgtcatatattccggtactcacttgggccaagtaagcgttcattcaggctagtcgtcattccagccgacgacaaggggacacatggccttgcggcatctcaatccgctttcgaggccgagttcgccgagttcgggtcgaatccactcggaatcgaaggagccgattgtttcaggtgagacctgcttacgggtctccgaatccacccctacgaccgtcacaagcggggcctcgtgaagtctgaaaggtttgggcgtccggataggtcttccagcgacggcgtttatgccactgcgaggcatgttgtcttccggaccaaacagttcgataggctcctcgcgatgtcctccagccctggcgtttcctcgggacgtcccgtcgatgaacagggtaaaaatgagcaagatcttcctccctgcacgttctacctctcggtggatagtgtggaccaccacttcggtaccgtgccgaagttgaatccccatgaggggtagagtatcgtacatgcggttggtgtattcgacgaaagctttcgtcgacttgtcgaagttgtccatcaggctgttgaccattgcgagaacattctagggaggatggggaacatgttctccgtgattagcgcctattgttgaaactgactagtcatcaacgggaagcaggagcttacctgtgcagcacagattattcgaagattgacctggctggcaagtttaactagtacatatccgttcttgcagagtagcaacgcaagtcctcctcctacgatcttggtcagaacggcgatcgaaacggcatgaactacagctgtcaggattaaggaacacgtgaggcgaagtcagccaaaacctggatttctgcacagagatgctggtgtcactatgcttacccgcgctggtggcggcgaccttcaagccgattggagcgaggattactggggccaccataattgcttgtgatgccgtgcgaagtggtcaagatgattctcgtatgatgatggattgggaacgatcagttagtgataggcagattgctaaagaggctgcttcgatcactttctcgctgctatatgtctatcccgaaatgcgccaatagcagtaacatttgcgtttcttgtggacagggagacgtgtttcgtctcgcggaagcagccaggtcagaatattctaccagattggtcccgtcacgtcacataaactgctaaatatttgcccggcgtggggaatatcactgatcgacggttgagttgccggtatatcagcttccgcgaatttatccgaagtttgacgtgagaactctcggacgccggggcggaatattgaggttgccaaaagagagactgcatcagcagaagcaattagcggcggcgactcccccgcacgattcgcttgtacccagtcgtctcgatccgagacttgtagccgctctctttcgacaagcacgatgtgatcacttctttgccgccaacggtcctcttccgatcaactagaagcattgtccttgacctccttgtgtcgcgaatccaactgtaattgcccatgccgaacgggagaaagttcaccttgttgatgggatggcatcgagcgcaatccttgggaagagactgagaaggatcaagcggacgtcatagatacggttggagattttttaatacaacgtcgagggcgaaggaaggaaaattcgggaaatatcacaaccatttgcttcgcggtgaaataactacctgcgttactcgcggtagacttcgaactggaccttgtactgcgtcgtttgctgcaaatgccgttgctcttggatgtacagctcgtgcgagccatagttgttgtttgggtctgcatccgcgggggattgcaaatccacgccattgttcgcgacgatgcagttgcggttattggctaaacggtgaacgacctgtccaagaaatgctcctgcaggtgcgacgagagcacccagcgggccgagtgcaccgccgaccagtacgcccaaagcagcgggaagctggttcatggtcccaagagcgacttgacgaaatacgccaggctcaggctgcaaagctggcatcgctgcagttacccctgtcagggattatattagcggaagacgatcggccggagataatttcactcacgtcgctcctgatcgtagaggtcgatcagagctcgcatcaaggcttcgttgccattgctgagattggccagcatgaatgtgaatcgaactttgatgttgcggtccaaacggaatcggtgatcaatccattgggtgtaagccccaccggacttctgaggacgtatctgtaacgtatggtgaaagtacttgtgagacagaattcgaaataattcgaccaagcgcatggtttacctggccgtagagatggcagaagtattgcgtcggcctaccttcctgtctggcagcgaagataatccagatgctgcgaggggaaagacgagtcaattcttgtaagggacatcggctagggctgtactgacgtgtcagtcccaggactagctttttgcagacataagattgacctaatactgattctgtagaagacctagatatgcagcggaaatcttgcactgtcagcgtgaagaacggcgcgtctgctcctttgcataggttacctcgacagggtcctgttttcgatataacgataatatttaaacgagtcagtctcatacttgaatgctcggtatcactacctgatcttactgacattggtcaagcggtttaacacctcgcgtcgagcttcttcttctcgctcgctctgtgtttgacggtctcgctgttcctgccttgcctgttccaaccctcgctcatattcggcgacctggtttctgatgatctgctgatcacgatcgaattcttgtcgcttttcccaaatcaaagcttggatttgtgtatccggaaatggaaccgttgaaaccgatttggcacgaacggttgtcgctcgattgttccatgagactgtcaggccaacagaaggtgatcagctcgggcgcttgcccgtgtgtaaatcaaagaggtgcttgcctcgcaatctttctaaagccatctggctctctctccatagctcatcaacagtgacgcaagcgctcagggagctaagagacgctttggcctcctcaaggaacgtggagagaaggtgttgcgactgcaactgtctcgctagagagtcggcgttcatgctggtgatctgggagaccttggccgcttcctgtgataacttacgtcagataccaactagaagtcgttgccaatattgcttacccaaagtttgcggaaaagattgatcacgctgccattgtcgtccgcagatgagtcgtctttcgactcgaagatttgcctcctgtcaaagcgttcctccaaattattgcgctgaattcgagagcaacttccgacttccattacaagtagtcccaaatgacatatgaaagatgctctggcttaccaatatcggtccaaattgggctcgagcttcctcctgaaacgcgatgagcctctttctcagaaactcggccttagcctccgctcgatgcggaaccgaggagtcgacgaaaagatttgcgtccggcgcggcattggagaggaatatgacgtcgacatcataaacagcggaccagtgcacgtccgatgtagcagcctgcgcatgaatttagcaaaggcgacagtcagcataggtagacatagtgttgcagccggaaatgtacacttacagtctcgttcatctggcagtcggacgcgagccactgcctttcgaagtcgctcatgatctccgcgatgaccttgactttctcatcatggttgttctcgtgaggccagtcccgaatggcgaagacaatcctgatccgatctgaaccagtcataccgatcctagcctgttcatccaaatgctgacgtctaccttgatgaagccttcggagaagaggaagacttgcgccatgggattgtacccttgccgaatacgatatgttgatgaccatgatgtgagcgcatagacaggccatgagggcgagacggctttgtacgtagacatcctagggggcattaaaatggaccaatacttgatcttagtttgtactgacaaaacccgcgccattatgggaaacaggcgacccaccgagtccgcctcatcgctcaattgatctttgccatcggccccctcgaggtccaagatcataccaacatgtcgttcatcttgggacgaaggtcgatccatgttgatgaaagctacgccgagatcgagacctgtgacacgaaatcaatgtaagagcctgcggataagacgggccgatttgtggaaaacggtgcatttaccttgagtcgtcaagccattgcagctaacaaaaggcaaatcaaacagggccgaaagaaattgacctgaaacacaagaagaggccatttcaaacggagaaatcattgccacgaacgacagataagaagtttttggctcactcttgcccatgttggcggctccaatgatgcagatgaccgtataaaggtatgcgcgttgaaagagggatttcctcgcttggtcagcttcatcggtacacgaggggagttcggatctatttaatcgaaaagtgtatcagtcatggcttcagctagtacggagcgagaaaccatctgctctgacccaaacaccatgcgccgatcagtgttgacgccgaccgcagttttgacaagcgggaaaattccgacaggctcgacatggtaggtcgtgttgcccatatctacgagaactgatacgatgccttggattagaaggtgttgatgatggtagttggtagagcaatcagtggagatgagactgtacccgcaaaagatctcggccagctaggaattctcaggggaagcacgagtatcttgccagggtcttatctatatgcccatcgtccgacggcgttcccgggtcaaggccaaacacgcatgttcgatccacctgaccgtcattgctgcgaatcgctgatcataggaggcacaaagaagactgcatatgaactatttgagagggaacctaggaagaatattccgacttgaaggcggggttcaccgaaatacttccgtgtggcttttgagcagtcccgataatattctgacagcccacagggaaatgattggttggaagcaaattgaaaacgcgtggaatctggatcatgtccccgaggccccggtgttcgtaactaggtctcgttgaggcccggcttacaataatcggtatataggggacggccctcgacagacccactgtatcatcgctgcattgtcaaacggtcgatggtcagacatcattcttatcgactcgtcactcaccaggcatgtcacaacgactcaattgcaggttagaaacacccggctcaggccttgccgaccatggggtaggcgattcagacgacgaaatactccgacacatcatgggaatcgatcccgaattattgaagcgcttattcgtcgatgagagtcaggttcgaagacctttgtagcgcgacgcgacgcttgtgtccggatacggtgctgatgatatgatagaatcccttatctcagcaggagaccgtaatggaatcagacaatggaaacgtctcgttacaggatgattcacccatcgatcatggacagatggacacccgctgcttgcgagaggatcagacgtcagtcccggtccaggcgatggcatccggatcttcaaaccacactgttctgtctggaaatcccgtcacgccgatttccaacaacgacaatgagaatgatttcgaggtggatcgaagctctcaaccagaattcccatccgtcatagaggcattcgacgactttcgccctcgaccggtacgtattcgtctagtttggcatcctgggagatagtggctaagaaggggttgatctcacgttcaaggcgcaacatcagcgctcttgcgaaacctcgagactgaaggttttgtacccccagacgggtgctaagattgcggagaggtttggattcgaggactaccttagcaatgcagttaacaagctatccatacatccttcatgtgagtagccttccgttgaacgctagacaacgcatgatgaacgggatgaaatcttacggaacaggtaactgtagcaaggtaagaaagctgctgctcctaacggtcctcaagctaattgatagggttctcaggtcgacttgcagccgataatctgggtcctcgctccggatctcttatcaaaaggtaccatcagcatcaatctcaccccaaaatcgccaacgggagggcaatgggttcctgcgagattccctcaatatccgatgaactctctggaagaccattggatatgtcttggaccactcgaaaaattcgagcattcaaaagaggtaagagatccgttcgcgatggctgacaggggttgtgccgccctactgacgcaacattgcttaccagcgcgatggtgcacttactttgaagttttccttctctgcatcagaccgcaaggacctgcagaagacatggcgcattgaaaaggcggttcgagttggcagagagaattcacttgttaaggcggaagattttttatagtaggtgcggtctagcccatctcttcaaatctcctctcataatctggtctctacttcaagcatcttaacgtggacgcacgatggtcattcgggctgtggcggacagttttattcggctatcttcaaaacgtatggtcaaaacaagtcggtaagaatcgctagtaataatttcgcaatcagccatcatacttatcccagaatggatcgcaaatgaatagaatcccgaatcagatcgaccgggagcgaacaagtaagttttcgccttcaagcagtcagtctcgatgcaattccgtgttgaggatggaattccgccttcaagcttgcagccaatgcaaagccaactggatcgtagggagcacgacagtgatgctactagacaagagcccgatcaagttcacaattcaccagatttgccactcgaagtccacgccggatttgcgaacctagacttcccaaatgatcagcccggaaccagtgcttcgacaacgagatcaagaaagcgacagcggaaagattcggaagacatcgctatggatgatcaggtcccgaccagtaactcagctttgagcgatgcgagcgaatcgacgcacagagacgaatctcgccgtcgaacacaagaacgtactgagctcacagggaacgcgcttacgggatccgccaacgacgatgctttaagaatgatgctgacgctacagcgtcaagaggttagtctccaacaaactcgagacagtctgaccgaatgtagtctattcttggtgagagcacttaagttgtgaaggaccgaggaatacaaggatactaaagatcggattgaaggcggacaccggtgattcgcggacagatctgcctggcctgtcgatcaggctcatcgggcaagagcaggatcagcgcttgtggatgagccggcaaggcggcggagcagggatagccagggtggttctaggcggtgcgaacagttcggaatggctcagctttatccacaactttgcccgtaaccttcctcagctgatcaattgccaaggtgcgtcgaatcgagcgagcctggcgctccagaccgatcgaagccgacctgaaaattccttgccaccattgtcacctgggcactctagatacgcagcggctcgaggcgatgcacagactatcagtcatggcccagctaggatttctctacagtgtctgccctcccgacaaccaggctccggaagaggtgaagactcgctcattcgaatgcatcacgtcgtggatggaagtcctcgccatgtttcgcagccaatgcagtgtggccgtccaggatcgctttgactgccttctggtgctcaaccagaggctactgagcgatatcataggggccaatgagacggggttactaaatgacatcaaacgcgtcggtgagtcaggcagaccctgcatccgcttccgccacgagtggcatctcgcttgcgtagtgatcgtgtggaaactcatcctctggccaccgcagtacatgaggtcagctcgaggcatgtccaagtcttggctggcagggtccacaccgaatgtctggatcactggggttgcgtgatcagtatcgaagcgcgacagagggaaagctggcaggacaagtggagacgatcgataccgcgccgagagactcgtgcgatgcttcccagcgtttgattgggggggagcttcctgactcgtcgctatttgaagtactcgtagtaccacctacaatgtcctcatcatattgggtcactgatttgatctcgatttcatgatttcatggtcaccgatcgtcaaaccgaaagcgaccgctctgttgagcgctcgactcgcagattcgcccgtcgaaaaagttcagaaccaagccgggtgaccgccgtcaagaacagtcgatctcgccagacgactcgagtgcgacatttacccggctcggtgctcgtcctcgatcgatttctcatggttgtcccgtactttgcggcattgtgtgggtgaccttggagggacgtgacgacgagaagtcgatactgctttccccgccaggagaagaagctggatgcatatatcatccggcataccctatcgatacatgagaccccgaccgtcctggccgtctcggcgctgctctttcctaatctccacgtcgacgccgatcatcgagccacctcctccccacccctcccttgttccccgggataaaccttcaacccgttcgtagcgtacggatccacctcgcccgtggtgatcttgagtcgggctaatcgacggtcccgaaaggtgtttttcgggagcatccccgagactgcttttttgatgatctgtaggtagggtcaagtacgcacgtaagatatcgagggcagaggcgtggagggtggggcgtcgatggtatcagcgcgatgtcctctcggataatgtgcgatcccgaccaccggcggcgactcacatcctctcccttcctctccctcaacctcccaataggtacctctttcaacccgcccatgaacccggaataatggcggtagactttatccgaggatttcttgcccgagaggtggacctgcgtggcgtttgtcaccgagacgtagtcgccggcgtccactgtagggggaggcggtcggacggcgtccagatgggagtttgcgagagggaagggaggaaagagagcaaggcaaggaaggagaggaagagagtaaggaagagaacgagagagttcgatttgattgtagtcaattcgatttcgaaggggggaaagacgaggatcagcccaaaggtccacctttcttttttggtacatggtcgagacgtcttgccgccccggacctcctccgaatcgacttgcctgcaggatcgtacgtcggtttatgtttccccatcaatacgtatgctatccgactggccaattgacctagcgtcctccctgatgcgtctacctggtgccattgacgagtgaatgcgagtgcggtctgttgagagttcccaccgggggtgcgtggtcagcgatcggttcggaaggaggggcggttggactgacttttcctcttgttgatgccatggtctagatcgatagtgtttggtagttggtgtaggaatggtttggctcgttcgttttactacgacgacgatgatatctaaagtgatccagatgtgcatgcatgcatgttcagaagttcaaccttgaatcgtatggtcgactcagagtctcaccacaagctatactactagtcgctagctattacggcacttgtctcctggtcgtcgcgcgagtctcagctcaaaagtagacacacaacatccatcgacatccgacatcgacatcgtttgaccatcatcatatcatcatgtcatcatcgaccacttcaccaccatcccagctcgacaaactaaacatctcatttcagctcgcctctctctctctctctctgttccgggatctagtagaaatttgggtcttcttctctctccctacgcgctctcgctctcgctcttctcgtctcggatcatcgtacaagtctcctttgttcccccccttttaacgaacctctcgccgcatcatcatcatcatcacaacgacgactaccaccaccaccatccgaactacaaccctcgacactcgaccctcttgaacgcccatgtcgactccgcaacaagaaccaggtcaatcccctgtacctgtaggtacacccgcggggaactcgtcctacggaatgatgtccccgccccaagtcgccgcgggaggcgctacagggatcccgatgggtcaagcagcgcccgtccagagcatggcagctatcggagtagatagtacaggggtgagcacggtggtagtcatgtcgacagggtcgagagaggtgcggtcggggggtacgaaagctgatctctctggtgtcgtcctcttcgtgtttgcgcgtctgggtagcaacaacgacgagctcatctttacgtcggtaacctctcccctcgggttaccgagcatagtgagtcaccccggacttgtccccgtcacacttactgactcccctgacaccctcgtctcgtcctggtctggtcagtgctcaccgagatctttgccgtcgccgggcccgtcgcccaagccaagatcatccccgatcggaatttccaacacggcggtctcaactacggattcgtcgagtactcggacattcgagcggcggaacaagcgttgcagacgttgaacgggaggaagatctttgataccgagatcagggtcaattgggcttaccagaacaccaacgcagcggccgggggggttcagggatcgatcgtgggaatgcaagggggagggaacgtgcagcattttatagaagtctaagtacatttgaaatatttcttttttttttcttttttttttcacgcagaagacggcatacgatttgagcgctagtctcgtgggctcggagatgtgtataagagccagggggtgagagcgtacgagcattgttttctttttacgacgacacggacggacggtcatgatgcacatgtaaactcatcatgatgatcacggaacgatatggcatatacgtttcgaagagactcgacccgtttgatgatccgactgaaaccctggtttcgcgcatcagggggcagtcatgttacgagaggctcgggaggtcgaggtcgaggtctcggcagatcagtgaccgtagcgggtttgaaaccgggcccattagtgccacccccccatcgattcttgtgtgaacgcggtacacgcgactgatcaaaaggctatttcttcccttttgcgttcggttcctatcttgaaccgctagttggcggcggaaaggggagaaaggcggcggggatggaaggaaacctaaaatgatcgggggaatcataggctaggctaggcgcggtaaggtaggcggtagtccatgatcccatcatcaatcagcctttgggacgcgtcgaggagggcagtggcacagtggcagggcggagtgaggggcaggaggagacacacccatccggctggatccggtcaacggggcgaggcagcgcgcgttgatctgctcgacctggcctgcctctgcgcctgccctggcccagtcccagtcccagtcccagtctatccctatctctttcccagctagaccagtccagtctcgccagtctcgacagaccaaccgaccgaccaacgatcatcccgtcgtcgtcgtcgtcgtcgtcgccgtcgccgtcgtcgtcccttttatttttatacttccacgacaccaactcgatctgtctcgacaacaatcaaccccatctttgggcaacgcaccggaggcgaaatatatccatccacccatctcgtcaacaaccgaaccgcttttttatttctaccctcctccccctcctcctgcgtcccgctcactcgcggtcacgttttcccccaactcgcactctctcccccgggtttaaagttatatgaggccagacgtcgatagtcgtcctttcaccctcaatcctcgccaccaccaccatcacaccgacaacgacgacaagaagaacggatcgacgacatatccgatccacggcaacattcaccagaccgacgacaggttggaaactagctcgtcctcgacctcggcgaccaacagcacgggatccctgaggaaacgatctttaccgaaatcaaactcgttggcgctcgaagagactggatttcgacgagtacctgctcaccaaagcgacgaggaccagcaacacggtggtgacgacgacgatcacaccaagtctaccggcaagcacgcaccttttactttttccaccatcgctccgttttcacctcctcgagggaaccggtacgaccttacgaaagacgctccttacgccccactctcccctacctcccgatcgaacaacacgcagtccagcatgttctccagccgacctaaatacaccgcccttcccaaccccaacgggacccccgggtcgtcctcctcttcctccgggggcaaacgacgcgggtccaccatcagcccgttgaaaaagatgatcatcgccgccgggctgatcaccttgttgctcgtcggcctcatgggcgggaaacacgtcacgcggtccacggtgggcgagcaggacgcgctcgaggggttcaacgaagatggatggaccgagggtgagtttacaaagtcccacgtcgaggtcgaggtcggtggtgcgtgggctgattagtactgcggcttgttggtggacatcgtcgtaggtgatttgaaagagttcgagtctcctccatttttgcccgagggcgggttcgagggtgacgaagtagatcctcaggaagatggcgatggcgagggggagggagagggagaggaagaggaagagaaggaggaaatgttccacatcctaccggtgcctcacggtaacgggcacaagaacgccgccgcgaccgaggacaagtggtccgccgaagacattgccgagctcgatggacaagagatggacgagcccgctggtggcaagacccacaagggagacgccgacgtcgaggacgttcaggtcgacaaggctgctgaacaggaacacgactccgaggccggtctcaccgcccctgaagaaatgacgccttcccgtgggcccgactcgtttgaatccgacaaggacgccacggccacggaattctgcgacgaagctcacgacgagacgctcaagttggttcagtacgcgatcgtcatcgacgccgggtcgaccgggtcgaggatccacgtttacaagtttaacaactgtggacccaccccggcgctcgagtacgagacgttcaaggccatccagccaggtctctcgtcctttgccagggaccctaccgccgccgccgcgagcttggacccgttgatgcaagaggccctcagggtcgttcctgaatcgttgcaaaagtgtaccccggtcgaagtcaaggcgaccgccgggttgcgtctccttcccggtcgagagggagaggccatcttggaggaagtccgcgtcaggctcgaatccgactacccctttgccgtctccaaggaggaacacgcgatcgagatcatggacggcaaggacgagggcgtttacgcgtggatcaccgccaactacctcttgggcaagatcggagccggtagccctgacgccgagacgatggccgtcatggacctcggtggcgcgtcgacccagatcgttttcgagcccacgttccccgacaaggagaccacactcgccgagggtgatcacaagtacgacctctcgttcggtggcaaggattacacgttgtaccagcactcgtacctcggttacgggctcatgcgagcgaggaggagcgtacacaacctcgtcgcgtttacgtggagctttttgcaaccgggcggagccgccggcgtcgagtgggatgatctcgccgaagaggttcaggtgcccaacccgtgcctcggcaagggcatgaccaggagggtagaactcgacccggccggcaggaagaacgtcaacgtcaccatggtcggcgccgagagctcgttcgaatcgtgcaagcgtgtcgtcgagctcgtcttggccaaggatgcgtgagtacacatgggtcgagtccgatgtgaagagcaactggtgaggcgtttgctgacgcaacttgtcgacctgcctacagcgtctgcgaggtcaagccttgttccttcaacggagtttaccagccttccatcttggacaccttccccaacggtcaactcttggccctgtcctactttaccgaccgaatccagcccttgctcgccccttacgccgccatgcccaagcactacaaggcagacgactcggacgccgaggagatcatctcggccgaagtcgacgttagcgacaccaagaccctgtccatcaagatgttggccttgatggccaaggacgtctgtgccggacctgccgtctggaagcgaaggtggggacacgacaaggaggccatggccgagttggagggaaggcccgagtactgcttggacctgacgtttatgcacggacttctcggtctcggtgagtatagatgggtacctagacacgcctctgaaaaggtcgctcatcctcgaattcatttctcgctaggttatgaactgtctgagaagcgagagctggtcgtcgagaagaagttgaggggcgtcgagctcggatgggctctcggagccggtatcgctttggtcgaaaaggccaccttgacctgcactgcctgagcggtcagatttgcttgaaggtcgaggtcggtttttcttttagatgtgcgcgtataggtgtaacacgttctttacaatgactacggttttcccggggatatgacacccatactgttacggacgttgatggtgcgctccagcgggctatgtggactagggtggggcagggtttcttgtcaagccaatcctttccaagtgacattgtgacgtcgcgataccgcctagatgcagactgctcggcaatcgaaacccggctaacaacgttgacttagtgtattgatttcgacttgcacttctcctcatgattcgttggtagagcgccgtgctgtagtatgagatatgtcgagtgactgttctggagatggatagcgacaggatatacaagtcgatcgacgcttacggcatcagatcaagatcgagcagcccccgaggtagagacagattcatcatcctgttgcttgttgagcttacattccgttcgacacatcctaacctatgctcacaatcccgaaaacatcatctcactagcctcggattgaccctttcgacccggtttcgtgagtaggttttcaggtcattcaggtcggacatccttcactcagctcgattcgatcaggtcatctcctttacccaaacaccccttcaacatgcttctcaaagtcaaggtaggtgcgaccgagcagagtctttctgatgccgttctgagctttccttgcttctcagcttcttaccggtcgagaggtgagctcaggcagaggccagactaggttcaaccgaaatatgtcagctgattcaccttgcttgaaccccacttcgacagattgaaatcgatgtcgagcctagctttaccgtatgccagatcgaatgcagccgtctgacgaacgatcagaatagaggctcatacttctcttgtgtcgttatcatctaggtcgccgaggcaaagaagcgagtagaggccaagtcggcgattcctcctgctcagcagaggttgattttcgctggaaaggccatgtgagtggcaatcgtcctcctagctctttcttaaaagttcggaacgaatcgatacagagttctgattcaacatgttgcacgttaccaggcaggatgacaagaagctgtccgacttcaagctcgagggaggtagctccatccatctcgtcctctcgcttcgaggaggttcgatctaggcgactccggtcgctccatcagggtcggcagcatgtctatggagatataaagagcgacgaagtcgtcggatttactagagccaagggtctcatcccggtacaaggtgttgtatcacgaacagagaatgacattacaccaatcgattacgacattcctcctcggtctggtcttggtaccaccttgatgcaaatcgccactttgggggtcttcaggtggtgaacatacattgctggggtatattaatatcttcaaggcatgacagaaggtctcgtcgtatcaaactcgactacattctccctgcgatccagctggactttacccctcggatacaaagcgctcacgacttccacctcgacgaaactcgtcttgcgtttggctttgatctctgtgaacacgttctggccgtcctgctcgatatcggccatctttgggaaaaactcgtacaggtcgtacgtaatctcgagcgccgacaagactcctccgtaagcctttgaaatcccggtatcgatgatgattacctccgagtcgcatcgattaacgatctggtcaaagttgggtgtgtggcctgtgacagaactatcctggtcagccagcgacaaggtggcattgcaacgcagcgaccgatgcctcacctccaatgatcctcctcacgcccaacgtttcctgcaatgtcttggcccatgcgcaaaccttttgctcgttatcctcggtggcgagccctctccaccacaacggcccatcggccccgtaaaggactttctcctcttcgcccgtgcctctaggcatgccagggtacgagttgggtggataaggcaatggcatcggtttcgtcaaagccgcagcgaggagcgagtggccgatcgcgttcggccgagatgggaacggttcaaggagggacaagttgggcttgagggatccgtgagaaaaggccaggtagtggtcaggcgagtcgtaaggcgcaaacggtactctggcggtgaccgtgtagctgaaggtgtgggtcatcagtacagctccatgctggaaaccaaagcaaatgtcgcttactttgccaaccactcctttccgagccacccgtcagaagatagagcttcttgcctcgcccgcgaacctccgaatgtcttgatatcttctggggtcacataccgccaatccccaatggcattcatgatttcatggtctgataaatgatggacgatcgccaagtcagtttccgttgcagaagagatggaacgacaatactcactgcccaacaccgagacgacatttcccccatgtgctggagcttgtgatcgtagcgattgcatcatcctgtaaagtgcgatcgtatctgttcccctgtactcgcaattcgattaatcgacaatgaagcgaggcaatcaaggacgtactcacctatcgacaatatctcccgtctgtacgagtgtagtctctcccgctttccattgaacttgatcatcgatgatccctgccatccgcagaacggtctgcgcgttactcaaatctgcggacgagacgaatcactcaataagggcagcttccgtaaagacttggttcaaaccaacctccatgaagatccccgaccgctactatccgcttgttccagatatggttgccgtgcggcaatcggtttggcgtattcccctctgatggcaccccatagacaggtgtccgccgtgccgttcttgaaccggacgccgagagtcggtatagcagcaaagctatgcccagtcctgccaaaacaagcagaagcgatatttgacgttggttctggaacgacatggtgttctagtccggccccctagtatcactagatcttgcaagacaacataaccttgggctgtatgtaggacctgatcaaacgcaatgatcaataccaccaatatattgagacaggtggaggtcacttgatgttcaaatcgcataaaatcataaaatccagattcgtcaccaaaatcggaaatgcatagaagtcaagtcaacctagatgtgaccttgatcacttgcactcttcctctctctcaagatagacgctgtgattaacgttcgacccaaagatcgagtctaccgctttctgatgtctgcttttcctccgaaatatggtcgcgaaccaccaaaggccgaatcgagcacgacaagggcgactcggaatacgctttacgggaccactgcataccagcgagaaaaagcaatggcggttacatatggaggcggctcttcgagcttagcgagccatcttcacaaaggaaagacagagtttgaagttttaaaggagaacctcaggtgagtgggaaaccagcagtcgaattcgattcgatctccagttgatagggatcccactcgattggtcgcatgtctaggttcatccgcgaaggtgaggatccgaagaatgtgacatgggaagaacgtatagctcgggcgtacgaatcgaaactgttcaaggagttcgctctgtaagtactaccagttctactttgcctgagccttccgtcgagcgctgacgatatctaagtgatgctggaacaggatagacctgaagcattacaagacgaaacggatagctcttcgatggaggaccgctgaagaggtcgtcggcgcaatcggggaggagacttgcgggtctttgagatgtccttatcataacccgcttcctcaacatctggtggaagagggggcgatgatgccgcaactgcaggctttcgaattgcccttcacgtacgccgaagccggagagaccaagacggcgctggtcaaggtcaaagtgtgccatcgttgcgccaaaaagctactcttcaagcccggtcaagaggaaacatccgagcgggcccaaagcgctgaccgcgaacgtcgcgatgtcaagtcggagcagcgcgagggttatggccgttcgtcagtcaagcgcgagcatgggagccgacaaaagcgacgcaattcaggtcgaggtagatcccggtctccggatcgcgaatcgcgccgggctggatcgatatctacaggagaaaactatccaatacaagatcgttacggtcgtcgttaatcgggattgttcgtcaagaaaagttcgtctccctcggttttggccttcacgtagctccgtcgtacgataggtcatccatgaccacattcagatctacggcttcttgtcttctgcgtatataccgtagatcttcttcggcgacttccttgtcaggggcattgctttcgataacctttttgaacatgaccaaggcactcgccaagtctctctggactccagagccttcgctagacttgcccttgccgtttgtcggtcgaggctgtttgtcaaatgtcacgccaggcttgacgtccaaagcgtctcgcttgcggtcgagcatgtcgagctcatattgggccaggtagatgtaactaccggcgatctcgcccacgtgacgctcctgcatctcggcgatctggatcaagcggcgatggctcttggcagcttctgcgtaattcgcctgactgtcctgaagttttgcgacgtttttgaggatggtgaatgtctgagattggtccgctccgaggagtgctcggttgctacattgtatggcgtccgggatactaattaagcaagaccatcgatgtgagacttaggacgttgcatcttgaagcggtcccgatgcctaccgtttcaagttttcgtacacgcaagccaaggcactccacattcggcaatcgtagggtctgtcacaccggcatcagcttccgactccggtgaacacgatcatgagacaagctcacctaagcgcggtggcccgattgtagtattgaatagcgtattcgggcatgtcaagcagctcgtacgtctgaccaagaccgtaccaagctcgataatctttcgggttgatatctggaagcgcatgcgactcgttagcacgtctgtcctccctttacccgccttgtgatgtctcaccgatggctctgcgataagcctcgatcgcagcgtggctgttcttgagctcgacaaactcgtgaccaagaagtgtccaggccggcagatagtccctgttgagcaggagtgaccgccggaaatattgaatggccttggtatgctcctctcgagccgaatagtagttccctagttgccatcagcgtcagcttcattgacctctcacgagcgcacatcggactagacggcagacagcgactgaccgatcaggcaacacacttctgcccggttcttattgacctgcgcatactcgtgtgccatttgacccaacttggcctttttccccatgacgtacaacatgttcgaatagatctcaatttcatcgagtcggaacgggtcgatctttcggacctcgtcgaaagccctctcggccgcctcaaagtcttaggtcgttactacatcagctgaacggtcgaacctagtccatggacggcccctcagactcaccacgcatgtgatacagcaccaacgctcgctgtgccatcaaatgcacgctaccaggataattcgcctgcagctcttcgaccgtctcgagcatgtgctcggtagcagagtgaaggtcgagcatgacggtgacggcgaagaagaggaacatttgaccttggggtaagagcgtcttgatcgccgagaactatacgcaagggggcgagcaccatgttggagcttctctcatttacacagaggatcggcgagaatacgcgcgactgacctcggcggtcgatgatacgcaagcggcaatactgagccaacaactccagttaaattgattggaccggatcgactcgatgaagcactcgagtgccagatctcgttggccgatccgctggtacaagatacctttactgtagcgcgaatggagatcatcgtcagtagccacattttcgatcgctgctacgtgaaacccacaggtacaagaggtacgaatcgtcttctccctcgagctggtccaggatggggacgacgtgtggggtcaacgtattgatctcgctctgaaaatctgttcgatcgacgggaagacaaacgagcatcagcctgtgatgatccgcattccgaaccttggcgatcttgccacagcagacttgcccatgaaatgaggcatcatctcctgagccttcttgtccgccgcctataccagcacgtgatgcatcaatgactcgctccgcactttccccctcggaccggaaacgttcggactgaccaggtaaaccgcgtacagcctgagaaacatggctttcttgctccgacacctttgcaagacgcgtctacaccgttcgagctctttcgtatcgaaataacactttgccaaggcgtacgtgtcgtgttcctcggcctcgacctcggattcgagttcgactggcggtccgtcccgatggggcccacgcgtattgcgctttggatgaagggagatgatcgaactgggatcgagcatgttctcgtccaccccgaaatcgaggtctagatcgagatcgtcggcatcttcttcgggggagaagggcgcaaagggggatgacgcccgtggagacttgtcgatccgatccggctcttccagcagggtatcttccatcagaccacctggggcgatcctcgagtattcgtgctcgacatcgatcaagttcggaggctggtcgtggaaatccccgagcgagactctgggtcgggtccgtttgtgcacgcgtggggaggggaatcggggcagagggtcggtcctgaaggcagagttcggggtggacgtttcccccagacgatgagctcgattagaccgatttcctgatccccggacggtattgatcggggtggacgagcgaaagtcttcgccagcgcgttgatgcgtatcggaaggccggggtcgagaggaagaggcgctggcctttcgaccgggcgtagggatcgatacgagcatctcgttggccctgtggagtagcgtttgagaggaaagatgggttcagccgaggtatcgcgacctactaaagcagtggtccgacttgccatttggctgcattgtagagacctctttcgctgcaatcgttgatcgctcgtcgcaggtcggcggccagctgagcctgttgatcgagattgagcgtgataccggcttggcccgtcctgctggtcatctctgcgggcattgatcttgatttggtatacaagtcggtgagaactttgctactaagctagctaacaagctaacctggtggtgatgaataatgaggtggtagctcatacgagcaggcggtcatgagagcttgaggttgttattgatttccccccggtgtatgggaattggaatgatatttccacctattacatcattattacgttacgttagatgggatgagattatttccacctttacagttgtgtcatcctctcgtagccacctctcggcatcggcagatggtgggaagggggaggaggaggtcacttgcacttgctaatcatcatcatctcgacaacctctatagatctatagacatcagaaccgtatacactcatattacctatcgacagacccaaggtactcgagattacagggacagaaataccctacgatctatacgtaacctctatctcgacatcccgcagagaaaacaagaatcaacttctcgcccaccatgcttccgcaagaggaattgcccatcttggaagccttggtcaagtaagtgaccacgcctcttgctccgacatgtcatcgcaagcgacttcgggggattgatcttctgaccttcgatttgcagcatcaagcatcgtttgacggcgctgaaaaaggtgagactcgattttgcgccgacttcgacaatcttttctgtcataccgatgttgaccgcgagtatctgttcaaccccctcacccccgcggcaggacacgacaacctttatccgagccaaggatgtcatgtccatctactcccaagttgccaaagaggtcaacaagttgaacgccgtccgcgatcgacatggacaagaggggatgatcagcgggtccgcagcgatcacgaacgacgaggccaattcccctcctacgagtcgatcccgacgagggagcgtcgctggcaaggcgtccaccctgagggaagtctacacgcccaatctcgacgagacggacaaggacaaggagttgaaagagtcggcgaggccagccttgggtatggacgggaggacgatctccatcgatagcacggcgtcgtcctccaccgcccggcagtcggtcgatggcgaagaggacgaggacgaggacggggacgatctcgtatccggtgaaggatcctcgaggaatgtctcggccatgtcgacccccttcgaggagaggggtaaccacctcgatcgatacggaccccctcgaaggttctcctctgcccgtcaatccccggccctctccccaccgctcgacgaggaagaagatcgcacccagacgggcgaacccaagaccccgcgtgcgtccgctcaacctctggacaccccagaggaacccaccgtggatgaagtcaccgcgcagatggaacaacaacacttgtcccaggtcgacgtcaagccgcctagcgagaccaaccgggtggatcaggtgttgaacgatgtctttggattgttgagcttgttcttcttgaccatcggcaagaccaaggagagccccggtgtttactgtcagatcgccagtatgagggtgagtccaagcagcagggagaccactctgtcatggtcgccgggtacgagcaggattagtcagtggctgacgtcatgttccacccgggttagcaactcttggatcacatgcaagagtcggggatttacacgcaacaagacttgcagccgttcgtccagcgtctgcacgtcgtcaagtcgatcattaaaaaggacaaggaggagggcaagcagtacactggggtggtcaagctcatgtggcgcaaatgggaggattgtggtgagcaccccgtgttgacaaacatacggatgctctccaggagacacgaggctaactatggccggttctgccttacagagcgcctgctcaagactttgctgaagtcgctctcggtcctctcggtcgagctcgtcccgattcaccaacgtctcgtccacattcgacgtcaactcagcgccctcgccgctcagctgaaacacgaaaagaaggaactcaaacccctcgtggaggaactacgaaagatcgattcttcccgggtcgatggcaagtttttgggacccggagggacctcggtgcccgccggtcaagccatcctggtcgggctgctggaagagtgtttcgagatcatccaggatatccgggccagggagggcgcagagaacgtttccccgcctttgaagcctgtttgggagagattgaccgagatgagagccaagttggaacgattgcgtgagtcccgggacaagggctcgtcctgtacacgcagtagcggtggtactgaacaatacgccttttaatgccgtcatcagaattgacgcatcgatggacgttgagggagacggatctttacaagtgaatggacgtcagcaagtcaggacggtggtcatgtgcttatatcacgtcttgttccgcagctacgctcaagccttgcgagaagtcgatggtatgcgggtcgatggaagctttgtcgataccgagggtaacaaggtgggtccgatcgcatgcaacgcacgcctcgggacgacaatcgatgctgatatccgacaccataggccgaaggacaatacgtcttgctttacctcttgaggcgatgtcacggtctcatttaccgattgatcgccgagtcggagcccatctcggaagagctgatgccaatcgtgagttcaagtctgccaattgtctttgttttgtactctggttgaagtgattctgatccaccctatccattcaggccaacaagctttcgacgataaagaagtgcctgaacgaggtcatgaagtacggtggaccttttagtgcgcgagatctctaccccgtaagcgcttgctgtgtccatagcacactcgtcatctagactgagctctctcctcgcattatgcagtaccacctcgcgcttcaccagatcgattcgcttcgccaggacggcaagttcttgtcagaggacggatcgataccagagggacaagccatcttggtagcgcaattgagcgaggcgcacgaattgctcgagatgctcaaggagaataccggagacgcgagcgacgacgaggatgaggacgaggacgcgagcgatgatgatcagatcaactacagtttgagcaaggccgcgccgcttgatgcgaccccgcggacaaggcaagcaggcgaagaggccatggaggcaaagagcacggaatagactcggagtcgaaacaggatgtatcgttgtagtttaccgacaagtctatatcaaattgcgcgacaggcatatttctacgagcacagaatgaacatcctagagacggcgcaatccgcgatgagtcagcgatgaagtagaaggggatgatccaatgttggcctccagtattcactgataacgtcaccctgtagattctgtgttgggtttaaatgaggatgtttcggtaaacttcgttagggcagaactcgacacttggctgggcattccgaggggggtaccagtcgatgacagatgcgacacatcgtttgcaagattgaatgaagtccccgtggcgggccggcggttgagggtggtcgctgatcccgacacatcgagactttgtccgtcccccagagtgatgatctggtagcactcgggtggtataaaaaatccgtggtaccgttctttccataccggcattgccatagggcaggcctggaggcattgccagactgttggtagccccacaaaaaatgaaggcgggagtgagcattcattttcaaggcagctgaaacacttcctgtcccaaagtaatccttgactgcacgccgttatgcatggcgtgcctaactgtagacatttcatgcacttgatggagttgtagattcgaggtatccattcgggcgcggccagacctccataacaacctaaccgttgggtcaagcaatactcgcaaatactattttctcctccaccactaagagacgaagtccggcagatgacctttgaagccttgcaattgaagcagggctgtacgaacaaagcggagagggactttcttaacagtaggagtccttccgaacttactggtgcggatttgtctaagtgaggctggtatatcgtagaagcatgcggaatggcgtggctgctattgtcaggaccaaagccgctgccgtgtaattcactattatcatactcgagctcagtcctgcctgtactttggtgggtgtagaccgacgatcctgtagcagaaatggagaacgggggagagattgagactggggcgttctcggttggtccctggtacttgggcatgagataagcttgcttttgttcatcccaggccggtagtagttccgtatttgcgtggagatactcgaccaggttgggacggctatgtgatccacacgggattttcatgtcggtacaactcttgcacttcagactccatcccagggggtccgtgatctgcttcgatcggctgaccacgatgcacgcgaacccgttcatgcgacaactgtcgcaagcatcagtcggatggatctgtacttcgatgtaccattcgtttcctgcatggccatcacaactcagattgtggacgccacagctaacacaggcgcctatgtatccttcccaagtactgagcatcctgtacatgcacgttttcttgtgtttcttgcaattcgagcaagggagttcggcaagatagaggaaattgccccttctcacgaggaagtcctttaccgtcgtccacagcttcattggcgcgagtgtttggtctggcatttctcggagggtaactcgctttgtgagctttgaaagcgaccactgtatagcttgcacgtcgagttcggaaaggctggaacatcggtctgatccgtctattcttacatataagcaatggtggaagggtggctgaatgtcgtgctgtcaagttctcatttactgcgttgcctgaaaacggttgagaagctaacgatcctttgtgcatattacttttatatagctacggcagctgatcttggttgtgcattctccgcgctgaccttcaaaaatagaataaatgaaataaataaatgaataattagttaatgtttaatcgggaattctgcaggtgagacatgcgccagcgcgccgaacgctctgcgaacttcggacacacggaagcggataaaaccgatcgcctgaacctgtccatcgtgactcgtctacgtgatggtgcatgacccgaatgttaaaggagtgctgctcgtcacacaagattctggcgtgctggcatgactgacgtgatttggttgtcaaaaagccccggaacctgtcaacggtttttgttcgcattgggccgagatcgcacttgcgtccagagcagaacgatatgttggcataaaatttatctgctatctactgaccacacttctaaatatgactgtacctattgagcgcccacataacgtatattttagctttggctttcaaaccgtaggtatggggaggtcacaatcgccggcgtttccctctgctatcatagtcctgctccccgtgcgacatccgcctcttgcgcgattccctggagtcgagactgtcccgtgagacactggatggaggtaccgtaacatcctcgctatatctcaaaacgttcgtacttgattcttctgcgtcaataccgaccactcctgtctcagtgatggcggtattacctcgttctttcggaaattgttcatcgaaataccctcgattccatgctgccaccagagacatcatcgtttcatcatcgtcttgtttcccatgtggatcttccagcgatttctgagatgactgcgtgaagggaagctcgttcgaatcgtcccaagatccgttggtcgtagccgccgtaccagaaggactgatactgttcccgggacctgtcgggttcgatgtggtagcggtggccacatctttgaactcgacagattgcaaactggatccaccgttgaccgctgattggaaatccgttccattaccaaggtaatacagatcaatctggatattgtggcggaaaacgggaaacttttcgtttcgtgccaggaagaaagtggtcggatcgtcgatttctataccacatgggtgagaacttctgcagctgacgcagctgacactccaccggacctgtttgttgtctttggcgagattgatgtaacacttcttctgttttgagttacaattcgggcatggaacgctggcagtagctgtgaatagcgcttcattcggtccggttaccaatgagcactgatagcgttcacagttctcgcaggtcttcttgaagttacgtgatgtttcgatgatacggaacgtgcattggagtccttttccgttacatttcttacatctcactggtgcgaggtaccgatgttgaggccaattgcgcagaaatgtttgcatcccatcccggtcgtcgaccaagacgcagttggttttgtccactgcaaattgcttcatagtgatcgcctcaaaagactcccacaggacaagacacaaggcttaaaattgggcatccaaatagagttacagctacaaagcccgtactgaactgtttatatggctttagtcccacgctgccggggggcggatatctgtactcctttgtctttcagtccaaggttcctaatacgatcatgacgcaagctgtatcgacacctcattcaagctactcttttgtctcctaagggaatgggtccagtcattttgtagctcagtcgacctggtaggttgaaatatgatccggcatcgtcaacctcaagtgcatgtttgaataggcgtctcggatctcgccttggctagccagtatcaggcgacttggaaaaaaaaaaggttggtagcttgtgactataaatgctattaccagtcattggtatgcaggaattggactgtccaaaggctcgaatgacgtcgtcacccacaacggtcagtagtggaggctccactgactacggggacctccagatctttcgcctagcggtctttttgtagccggctgtacgagatgagtccgtacgctttcacaatgcaccacctatgcagtctaccagaactaccatatctttcgttgttattgatattgtaagatgtagtacatcagatttcccggttcatatcctaaagtgttgattccgcggcaaatggtctcgacgtacttgtactccatggagtctttctgaaaccggacaaccgccattacacgctgcagcgatgtgtatctttttccgcagctgaattgacaatcttcatgtgtatgcaaaaattgttcaaataggtccgccacgatgctctgaacatggttgacaacgatgactgctggtagtatcgcgctaacgcgccactcggctgacatgaaacaccggttctggattgctcatctgaccgtcggggtagagactccgtccaagacaaccactgtcggttaatgtagagagatctccagtagccatgcttgcttgcttgcttgcttgcttgcttgcttgcttgcttgcttgcttgcttgcttgcttgcttgcttgcttgcttgcttgcttgcttgcttgcttgcttgcttgctgttacgggaagcgacgcggattcggctcctacgcgaccggcttcggctcgcgcgctctcgtcaccctctctactatcgacacaatgcatattcgatatcaccaccaccagagaacaatagcgacaccctttcccatcgtcccgcgtcgcgagcccccatcgactctggtttccaccgacgcatcgtccattatacgttggcatcattcactccacatattctgaatcgtccctcgtcagccctgctgtctcgtcatctatccctcggtgacaccccggttctcaacgcacagtggcggggagaatataaacctcgagtgatcatttcgactacggtttttttgcctcctccgcgaaaggacagctcggaagctcggtgtgtcgatacccatattccagggtcgatcgacaaaaaaagccttcgtttctctcgcaccctcataagggacgactttggatcatttctcaagtctatacttcgtcaaatggtaccatgacagcaggaaatcgttggtctgggtctgctccggcatcatcccaagatgccgcaccggggtccactagcaacgcagctcgacctgccggtgggagcgagaatccgataacgaatggtggtcttcaacaacatcaccagccacgacagcccgagtcattcgcacagggtcgcacgagcaacgatccatccggctctgccagttcgacttcgtcctacccacatcctgcttcctcatacacgccaagtcaactgcccctctcgttgacgtcggcacaggaagctgcgagtgccggaccagccaatctgtcttccctggatcccccgacatatccttatcgaccgtttcctgatcggcaattgccaccctttggtccccgaaatgtcgtgggcaccgatcgaggacccctcgcattgccctccatttcccatccaggcattcgacctggcgatgcgagatcaccatttggcggcaatttcgatcggcccgcctcttcatcttccaccatggcgagactcgtcaggtatggcggtgatccacagcgcgaccaccctcgtcactctgaagagagcgcgttgtatcgagcgcaaccgtcgtctttctcgccggctgatccgtactttccggggaacccttacccacgtcccggatcgagcaacgatgtcgatcactttgggatcgcttccctgctatccgatcgacacggccgcccggaaatggttcctctggtgcgacccaactcgagacctgacgggccgaaccagcagaacgcgctgatgtctcctcgtacttcggatgcatctcacaccaccagccttttgggatacgaaggagacctaaagaggaaacgtatcgtggatgactttactaataggactcgattgccgagcttgccggggctctcgatgccatctttacccccaccaccgggctttggctcatccagagcgaggtcaccctcacccctcgcctcttcctcgtcccgtcagcctcggcaatatcatgtccgagatgcaccccgctcagggttccgtctagtcggcgattcatctaccgatatcgatcaactggatatggacgtcgatggcgttgatggtgcagaatcgtacccggcaagcgggactggcaaggagaaggaagatgcgagaaaagaaaaaaaccgggacaagcagaggagattgagaggtcagtatacacctcttcggctcagatagtctgtcagccgtacgctaataccacttgatcgacaatcgcgcctaccctgactgtgctcagtgagacgtgccaaccaactacagtctttggagaacacggtcgcaatgcaggaggtggagatcaagaggattttacagcgcgccaaaaacgttgaagacagatcacgtcagacaagggcgatcttttccgattgggtagacgccctggagaaccgcctcaaggagctgggcgaaccggatagcgcaatcgagagcttgcggaatcagcatctcggtccgctcaatgcgtacagttcagactacggagccgactcggcctacagaggcacgaccgagtcggcttcatccagtaacaggatcagctttagcaaggaaatgtcagaagatacttcgaccactcagtatattgatcatcccgccccgatcgatacgaggaacctcgcgataccaatcgctagcaaggggaacgagcatctactctcacccacagcaaccgcctctcttgtctctccgtcggaatatggcgcgcggcggccacagatcgaggcgtacaacggaagtcgacatgatcacgatacagggaataggacgcaacacgggaatccagcttctcataagttggatctctggcatcacgtggattcatatcggcctgctgactcgccgtcaatccagcaagcggtagacggcagatctcgtcgacggtcttctggtcaggaggtttcagtgcactcaacaaacaggctacagccggatgccgtccacgaagaccgcacatttacgcccgaatatctcgctcggctagaagaagacgatgttttccgaatgaacgaagtcgaatgcatagaaatagccagagccctggcgagacagagacctcccgagagagaactccaagtgaattcgcatggagctgaaacgacggagcggttgggagcttcacctccctggcgagacgattttactaccgcacaactgctgttgctttgtcgggtgcttgacaccatgcacgacgaggtgccttcgattaaagaacgatacgtgcagcacaggatcgcgatgttgagcgagcacgaaaaggaagtgtacaacaattggactcgacggccggaccgggatcagcgcatagaattgcttccagatccggtgcttcggctccgcttcatcatgcatcaggagtctaccgtcaaggctgcctccatcattgccttcatttctgattggctacacgaagcagtgtacgaccgtctgtcctgtctaacctgttgtgcctcagtctaatttatttttcttgcaacttcatagactctttgggcctccgtggttgacccacttttgtgaaatggtaagataactggtctccgaaatgaatctccccgctagcaaaggccggaaccgactatcaatattctccttcgacagcctcggagcttcctccatcgatggaatgctatttggccaaaggacgccactgcagaagagctcgtcgagatgcgcagggtcggtagctatacgggcgcacgccctttcgagattgttctcggcacggaaacatcgagggctcgccattcggctgccgatatcgacctggctgcattgttctctcgcgcattgtcagggtcataggcacaaagcgagcgaagaggctgttcccggacaaggctcggcaaacaggctcagtctcgtctagccgcgatctgttaataccatgttctctaccaatggatcatgtatatgctgagcttcccggctcaatctatttcgctatacagtgtgtcgcattataatcatcttcgattccaaatccccttgatcttactcgcccgaccagtcgtgcgtgatccgctcgactcgatttgtcggaagctgtgagggatatcagcgcaggtctgtgatgtccgaatgataaatgtccgcaaactcacttggatgacaggattacaagggcctggcgaccggagtcgcttttttgctctgggcctgttcctcaatgagcctttccagaaggctcaggtcgagaaacttgtgaacctttttcaaggacacttgacctcgaggatgtttcttgccctttgattcgggctgaggctgatggttgttctgatcggattgtcccgacgacgatttgggctgcttggcgatggtgaaggtgcactgttcttcctggtcgctttcctcgtcaaactcttcgtcggggatgtagaagaaggccttctttcgagtgaacgagttcatggattgcgtggatccagttggcgaggtcgcagtgctttgatcagaggcagtcgagccgcccgaaaagtcggacgaagtcttgcggacagtggaacggtaggtattagacattgtgttttgcttgaacaaagtcgaagtgatgtgaagggcctttgtgatgcgagtcgaaggacgattggcaaagataaaggcgatgagatgtgatcggtgcgtgttgaggtaagaagggggaatgaaagagagatggttgagaagatcgctgatcctctcttgcctttatgcaagctggtctggcctgagcgctcgtcgcatctttgaaaggggatgacccgcttgttgcgattcggactgacctcgacctgtttgccccgcgacgccatccggattgattcgcgagccgataagggagtgaaaggcgggggaaacgactcgttttgacgcgacgacgtctcctcacgcggacgcctcccgcgcttgcgatttgcgggatctacaggtgtaaagaaggggtcacaccgtcggccctgaccagtctggatggatgatgcaccgacgatctggggcaaaacagcctccttgtcaggggcgacgcgtgacacatctttccgaggctgatcttctatatgcaaattcacaaaggggatctcgtctaatcatacaagggaaactctactaccagttcccgcggcccccgctaccaccaccatgaccacctcctcgctgtcccccgtcgcctcccccgcctcctccgctgtacggcccgtcatcgttccagtccaaacgtgcttgttggtgtgagttatcctggttcatcatgttcgtcattggattcgagttgctcatcattggcattgtgcccatcatggcattgccgttcatgcccgctgccgagctcatcttttctgccgtcgcgttcatgaaccacatcataacatctgggccctcgggcggtctgccgtgggtattgatccacgcttcacccaagacttcccatgttgccgcttcagcagggttgagcttggtaatatcgagatcttccagcttagttttggctttgtttggctttgtaatctcgaccggctataatgatatgtgcggcggtgaataccggacaatggctgcggccaggccacttgcaatctactgactttgactgtaacatctctctcgacctccgaccgcgaacgatcataggctgctcgatcccgctgtggactctgcgaccgtctagatcccaaatctcgaccgaattcgtccttgcccggttgacctgcaccaggaagcggtgctctgcccgacctcgcaggctctggtctcgaagcggctcgtgaaggtgatctggacctgccgcgtgcttggggccgccaaccggaagtgctcgcaggcgcatttcgatcgaagcgtccaggctgaggtgggctgttccatgcgcctccggctcgggatggatgactctcgccgccgagatccctattgtccctgtccaggtatgattgtcctcgagaaggaccagcattgtactgacctgccggtgacccaacatgaggcatcgaaggtggtccagctggtggacccataggaggtggaattgaaggtactgtcgtcggggcttgtcccatcatggcaaactttttcgcaatctcgtcgcgtttcgccatggctgcggagaggtggtcctgcgcagggggcacgaacggtgcaggcggcgcagcgatggtgaaaggcaccatcgggttgggtgtagctcttgaagcctgatcgccctggggatgcaggacaggtggtgcgtatgttggcgtttgtacgaggttggatgacccttgaccgacactggcgttttgaggcggtagaaccccgttgagagaggtcaaatttgggacggccgcgacgctagcagacggcgagcctatcgaattgatttgggcaggactgccgggtcttcacgatcgtaacaagcagtagctgatacattagcgtcttttctgaactccagtagatacaggcgagatggactcacttggctgtcccgacattctgaatctgatttgacaagaaactgagaaagtcgggcatgataggcggcgtctctgtatttcgcgcgcgcgagaaaggcgattacggcagcgagaaatccgagcacaagaaagagaaaatgagaaaacgggtcagccaactcgtctcgaggcataatctagatccaattcacatcccgatcatccattgcctctgtctctgcccacatcttgcaccccaacactcggcgggtatggtctggggtgggctcctatctgctaaaccgagccgcccgcttgtcacgggcatctcctccttcccctctccgtgccctgtttccaggctcacgacttgcttgtagacaacctttcgtctacagccttctattgtcttctgggcagcgacaccaagctcgacccttatcaggcacaccaacgatcaacgactcggagaacgaggatcaggcaatcagaccccgatcgactcccactctcgtcgctttgtctgttctcttgtcgctcgatcatcgcaggtcgtttgcaaaaggttggaatgtatatctgaagcgatggtagctaccgaatatacaatcccttcttttccccgagttcgagatcgagattgactcttgagaacgggagatgacgacgtcgacggcgtgatggtcgcctagacgcaggacgggccgttgtcttctcaacttggtgttccgtctctctcctgtatgagggagcaaatcgacctggccggacgaggtgacgaaggtagcgacgggccgaggcgcggcggggtggaagacgagcgtaggcatgggtcgatcgtttcccctaccctcgccttcctcccgatccacgacctccaacgcagcggtagctggacccgcatgaccgtctcgtgactcgtcctcttgcgacgccattccaacgtcaaagccgtgactgtgatgggaaaaacgcaaaccaagcccacagacgacgcccacgtcgacgtcgacgggatcgaatctcgtataccgttctccgcgtatcccaggagagagatcgagagaaaagaaatcgcacgaatattcaccttgtccggttgcgttcccgttcacacctacgcctgcacctgcacctgtacctgtacctgtacccacacctgtgcttcccgctcgacctagatctgccgcatccggccccgcggtaccgcttgacgtagatcctaccttgggacttcctacaggcgtggtagaaccctgccctgaacccgcctggctcacgttcccggtcgtcccggtagaatcgacgatcgcttgcactcgcgctaaagctgccggggagaacgtctgtgatttcgtccatatatctaggatcttgatcatcttctcctgtagacgacgagcatagggatcgacgaggagcaaggtggacaaaaaggggggatcagctgcaggttcacctcgaccacccatgcgccgcgctggaaggccttttgacgataacatccggattcccaaatactcactctgccttcgggccaatcacacatatccctcgcccagccttccaggacaccttcgaccttgcccaagaaccccttggcgtaccccgccgtcttgccgccatccttgtccttgtccctcgaagcgttcctgtacagcttgtgcaccccgcgggctagcgaatcgagcgcgtagagggaagaaatctttccttgagatctggcggggagggatttgtgcgtcttgtggatggcgtggaggagggcgatgtcgtcctgcgatgtgtcacacgatgagctcggtttcagttgccgggtcgatcgtctccacaagacgaaacaagaagcggggagagagaggttaccttgaggaacttcacgccggtctgtacgacctcttgtacttttgctccagagagacgtttagcttctaccgtctgccggaggagaagggtaaagtcctgtatcagattaatcgtgaccctcagagtcagcgaggaatgtccaggccttcgttcttacggccccttgtcatgaacgggattcacctcgatggtaggtttcttgtccgacatggttgtatctcgttgagccgagattaacaaggctgggaagggaagtggaacggatgagaaatgttcgtgtatgttgctcctctatatcggtacgatttcctttgatcgggcaagtgtgagctgagctagctctctcaacctggaattcaaggtcgtctctaacgaggaacgataacgcgtacgcgtgagaatgttgacaagatttataacggcaagtcgccttaaaactggatcaacactttccctttggtcatctgccgtaattaattctcgttgctgctctcgtcatgattacgaaatttcaaaagagcccgatcgatcacgatcactcatcatccttggagaaaagtggaggtcgaggttcaaccgacctagtcgcctagtcgattagacaaccctctcatgtaactcgtctactcgatgctcgagatttcaccgacgcccatacggcatacgttcgaaattacaggcgagaccaaactcgcaccttgatcttcccggaacaatccctgcttagcttaccgcaatctgtcagaagcttcgttgcgatggaacgggacactacatcgtccaaaccgaccgaggacgagctcgagaggttcaggcaggaatggcaacaggagctacagcaacagcgcaagaaccagcagaatgtcggctcacaaagcaagaccaacggtcagggtgttccctctcacgctgttgctcaaaaggtgactgcgacgccgctaggtgttggcttgggaccggggccggggacggggtcgactctgatggcaacgtcacctccgaggacctttccccgtaacagcgactttgattcacctcgtcaaacccggacacacgaccggtcgactgacctgcgtacgaacggaccacctcgaacgacttcccccaaatcacccaagaagagcctggcacccccacatcaacacgtcgggaaccagggagatgcacgagagcacggtcgggaaagtcttatcaatcctccttcctcgactggacctcccacatccacgccgagagcagcaggtctctcagcgggtccctcgtcgtcccctcttcccccctcttcactgacgtccgcctcgacatcgacgtcgacgatgacgaaccgaccgcccaaagaccccaaggggaaacgagcgctcaagacggcccaggccgtggaacaatacgccaacgccgtcgagctggaacagatggggaggttgaatgaggcgttacagttgtatcgaggggcttacaagttggacggtcagtgctcgggagtggtcgtgctttcgtgttcgggagcagctggcttatgtgtggtcgtgtccatcgggctgtcgcctttctcacctcgtctttgcgtgggtgtgtacggtcctcgttcatcgaacaaacaaaaaacaaatcgcagctcaagtggagaaatcgtaccacacctgggtgatggaacaagaagccaacctattacaagggatcgaagagatccagttgaccgaccccaaacagtccatcgcggggtcgttgagcgatgtcaaggacgacgtgtatacgttccggacgacggtacagttggatagggattacgtccctgtcacctctagtatcgtcgaggacccttctgagggtacgtcgacggctagagcgttgacgacgaggaagcaagcgggtcgaggagtggcaggtgaatcggcgccagcgtcaatcgagggacaaggcgtcgtcgggccgagcgggacgtccaccccgatagaaccaggtatcggggatcgcaacgacccgctcacccggatcttgctctcctggttggagaccgcacgggaagagatcctccatccgcctcccatggatccatcatcatctcagctcgttcccacctcgccattcaccccagagagattaccggagaatatccacgatctttaccatcacctgcccctcttgccgttggacgaaaagtacccgatcctgctctcggcgcttccggaggagattctcgaaaacgtcgtcgagtttatggacgtgaccacgttggagcgattcgcgctcgtctgtaaacgattgagggtcttgactcgcggagtagggaaatggaggtcagtcctccttggctttgtcccctccagagtcgacgtgctgatcactctgtgaaacggtacaggacgctctgtcgtcagatataccgcccgccgattttgccgcccgagttgccgctgtcgacgctcgtcaaacggcacgggatggattatcggacgacctttttagaagagcgtagggtgcggtacgatggggtctatatcagcgtgtgtcattacatgtgggtttgatcgtggaatgacacgcagctcaagaggaggtagctgaggaatcgagttctggttttgaactgatagtcgaccggggcagagcgagcttgcttgggtcaacgtaggtccctggtttcgattctcaattgtcgatctgaatggctgactctgatccgcgccgtcatcgcatcgacagatcactcatctcagtaagtcgtcccccggtcgccatgcgacgactcgaagtgcgattgattattggttcgacgtctctcagtcacgtatcatcgtttcctccgcttctaccccgacggcaccgtcatcgccttgttgactacggatcagtgagtcccttccgtctcgacccgacccgacctacgccctcgactcggctgacgtctcaatcttgacgctcggcctcagccccgtggatgtggtccacaacatcaaaccttctctgagggccaaggggaccttgttcggtcggtggtcgctttccgactgggatcctgacatggaaaaagatcgaccgccgttccccgtcaacgagctcgatcctgcatggcctcccaactcgcgtactagcagcgccaaggacccgcatgcgagcgccggtcatccctcgtcatcaccacacgcgatcaacttgatctcgatctcggacatgatcgaacctggcgtagcccatcccaagtacacgttcgagatgaacctcgagctccgttcagctcagcgtggacgatggaacaagctcgtcatgcgggattaccagagcgtgaggttgggtacaggggaggcattggggttgagcttgaaacatcagaaaccgttcttcttttccaagtgagtctcccctctcgtcatcgttgtcgtcgtcgtcgatggtcaacatgggaatgcgagtaggagcctgacggtcggttttcacgcatccaaacagggttcgatcgtattccaataccctctagatggatgctagatggctgctttcgatattgcatacgttttgtatctataccacgctctccacgttacacccaccatgatacgcccggagggacaccgaatttttaataggcatgacaggcatgacctcttgtttactttgcaatgtggatggggttttctttgatagggcatcatcggtcgcgcgctgtatggtggttcgggtcgatccggccctgagacgggcgatcgtgaaacgcgatcttgccgacctgggccgttgtacgttctcggtggatttatcgattcatcgtcccgtcgcccgtcgcccgtgatggtggtggtggcgactcgtcgagctcgtggtgagcgacgggggcgatggcgagatcgatcaaccagcgcgcgcgcggggggagattcctaaaaatcgagcttgattggtgattgatcggatgcttttcatctccttcccccccccttgccctccagcctgctgcctggtgactagacggtggcgtgatgagagatggttcctttcggatgcaaaagaaacaaaatacgcgattccacttttgaattcggattgagcccctgcctgttggctgttcgcccatgccaggtgtttgcctagatttacgtgattgacggccaatcggggtcgatctaaaaaagtgggaaacaggacaaataccagtactcattcacttcaaagacgacctacctacccttatcaccgccacctatcctccgacccctacaactcgtctcgatcttgtcacgatcaaccctcatctaatcgacctcggttctgtccttcgtataccccttgacctgtggacgatcgatagtttggcggatcatcatcggtgagtttctttccgctctttgcctcgcttcgccccggtccgatcgaaaccaaaacgttcgggtcgacaatcccatcgtatataatcaccagcctctaggactcgcatcgacctgccaaacgttcacatactgatcatcgtggattcaatctcgaatttgtacagaccctcttctctactttgacgagctccaccttcctcatatcctcacctagtcgctcgttcaatcatccctccctcgccggacccctcatcgacccgaaaatcac
